(19) United States
(12) Patent Application Publication
(10) Pub. No.: US 2004/0219549 A1
(43) Pub. Date: Nov. 4, 2004

(54) Methods and nucleic acids for the differentiation of prostate and renal carcinomas

(76) Inventors: Jurgen Distler, Berlin (DE); Fabian Model, Berlin (DE); Peter Adorjan, Berlin (DE)

Correspondence Address: DAVIS WRIGHT TREMAINE, LLP, 2600 CENTURY SQUARE, 1501 FOURTH AVENUE, SEATTLE, WA, 98101-1688, US

(21) Appl. No.: 10/480,846

(22) PCT Filed: Jun. 14, 2002
(86) PCT No.: PCT/EP02/06603

(30) Foreign Application Priority Data
Jun. 14, 2001 (DE) 101 28 509.4

(51) Int. Cl. C12Q 1/68

(52) U.S. Cl. 435/6

(57) ABSTRACT

The present invention relates to the chemically modified nucleic acid sequences of genomic DNA, to oligonucleotides and/or PNA-oligomers for detecting the cytosine methylation state of genomnic DNA, as well as to a method for ascertaining genetic and/or epigenetic parameters of genes for the characterizing, classifying and/or differentiating of renal and prostate carcinomas.

### FIELD OF THE INVENTION

[0001] The levels of observation that have been studied by the methodological developments of recent years in molecular biology, are the genes themselves, the translation of these genes into RNA, and the resulting proteins. The question of which gene is switched on at which point in the course of the development of an individual, and how the activation and inhibition of specific genes in specific cells and tissues are controlled is correlatable to the degree and character of the methylation of the genes or of the genome. In this respect, pathogenic conditions may manifest themselves in a changed methylation pattern of individual genes or of the genome.

[0002] The present invention relates to nucleic acids, oligonucleotides, PNA-oligomers and to a method for the classification, differentiation and/or diagnosis of renal and prostate carcinomas, by analysis of the genetic and/or epigenetic parameters of genomic DNA, in particular with its cytosine methylation status.

### PRIOR ART

[0003] Currently characterization of cancer cells involves the histological and cytological analysis of tissue and cytology samples for features associated with malignant transformation. Immunohistochemistry, electron microscopy and single molecular markers are applied to answer specific questions. Specimens of tissues and cells are obtained through several procedures, including surgical and endoscopic biopsy, core and aspirational needle biopsy, venipuncture, spinal tap, scraping of tissue surfaces, and collection of exfoliative cells from urine or sputum.

[0004] The questions to be addressed are the firstly, the degree of malignancy, and secondly, the tissue of origin of the (malignant) tumor. Correct identification of the site of origin is of great prognostic and therapeutic significance. Although the organ of origin of a cancer can usually be determined by a routine clinical examination and different imaging techniques, in about 6% of cases diagnosed with cancer, the organ carrying the primary tumor cannot be defined (Greco F A and Hainsworth J D, in: Cancer, Principles & Practice of Oncology, 6^{th} Edition, DeVita V T jr ed, Lippincott Williams & Widkins). Furthermore, often only a small or otherwise suboptimal sample is available, therefore histological examination cannot be performed without major difficulties. Electron microscopy, immunocytochemical and molecular genetic methods have increased the probability of identifying a likely underlying tumor type, but still 60% of the tumours cannot be assigned to one of the major histological groups (Hainsworth J D, Greco F A Oncology 2000,4:563-74; discussion 574-6, 578-9).

[0005] Similar problems are encountered when typing disseminated tumor cells in body fluids, e.g. peripheral blood, urine, sputum, pleural effusion etc. Disseminated tumor cells are found at early stages of cancer in the peripheral blood and other body fluids (de Cremoux, P, et al, Clin. Cancer Res. 6, 3117-3122, 2000; Kraeft, S. K. et al., Clin. Cancer Res. 6, 434442, 2000; Racila, E. et al, Proc. Natl. Acad. Sci. USA 95, 4589-4594, 1998) and can be used as an early screening test, determination of disease extension, evaluation of minimal residual disease, early detection of recurrence and therapy monitoring. Prerequisites are highly sensitive procedures to isolate epithelial cell from body fluids, such as immunomagnetic enrichment combined with flow cytometry (Martin V M et al. Experimental Hematology 26: 252-264, 1998) or size and density dependent methods (Uciechowski P et al. Br J Cancer. 2000, 83:1664-73) and typing methods which distinguish between cancer cells from different tissues of origin. Recently, several groups have shown that precise determination of tumour class can be achieved by microarray-based expression analysis. Golub and coworkers screened the expression levels of almost 7000 genes, between 10 and 100 of which were then shown to be sufficient to distinguish between acute lymphoblastic leukaemia (ALL) and acute myeloid leukaemia (AML) (Golub et al, Science 286:531-537, 1999). However, application of mRNA assays in the described clinical situations is impeded by several reasons: the extreme instability of mRNA, rapidly occuring expression changes following certain triggers (e.g. sample collection), and, most importantly, the large amount of mRNA needed for analysis (Lipshutz, R. J. et al., Nature Genetics 21:20-24, 1999; Bowtell, D. D. L. Nature genetics suppl. 21:25-32, 1999).

[0006] Aberrant DNA methylation within CpG islands is common in human malignancies leading to abrogation or overexpression of a broad spectrum of genes (Jones, P. A. Cancer Res 65:2463-2467, 1996). Abnormal methylation has also been shown to occur in CpG rich regulatory elements in intronic and coding parts of genes for certain tumours (Chan, M. F., et al., Curr Top Microbiol Immunol 249:75-86,2000). Highly characteristic DNA methylation patterns could also be shown for breast cancer cell lines (Huang, T. H.-M., et al., Hum Mol Genet 8:459-470, 1999).

[0007] 5-methylcytosine is the most frequent covalent base modification in the DNA of eukaryotic cells. It plays a role, for example, in the regulation of the transcription, in genetic imprinting, and in tumorigenesis. Therefore, the identification of 5-methylcytosine as a component of genetic information is of considerable interest. However, 5-methylcytosine positions cannot be identified by sequencing since 5-methylcytosine has the same base pairing behavior as cytosine. Moreover, the epigenetic information carried by 5-methylcytosine is completely lost during PCR amplification.

[0008] A relatively new and currently the most frequently used method for analyzing DNA for 5-methylcytosine is based upon the specific reaction of bisulfite with cytosine which, upon subsequent alkaline hydrolysis, is converted to uracil which corresponds to thymidine in its base pairing behavior. However, 5-methylcytosine remains unmodified under these conditions. Consequently, the original DNA is converted in such a manner that methylcytosine, which originally could not be distinguished from cytosine by its hybridization behavior, can now be detected as the only remaining cytosine using “normal” molecular biological techniques, for example, by amplification and hybridization or sequencing. All of these techniques are based on base pairing which can now be fillly exploited. In terms of sensitivity, the prior art is defined by a method which encloses the DNA to be analyzed in an agarose matrix, thus preventing the difflusion and renaturation of the DNA (bisulfite only reacts with single-stranded DNA), and which replaces all precipitation and purification steps with fast dialysis (Olek A, Oswald J, Walter J. A modified and improved method for bisulphite based cytosine methylation analysis. Nucleic Acids Res. 1996 Dec 15;24(24):5064-6). Using this method, it is possible to analyze individual cells, which illustrates the potential of the method. However, currently only individual regions of a length of up to approximately 3000 base pairs are analyzed, a global analysis of cells for thousands of possible methylation events is not possible. However, this method cannot reliably analyze very small fragments from small sample quantities either. These are lost through the matrix in spite of the diffusion protection. An overview of the further known methods of detecting 5-methylcytosine may be gathered from the following review article: Rein, T., DePamphilis, M. L., Zorbas, H., Nucleic Acids Res. 1998, 26, 2255.

[0009] To date, barring few exceptions (e.g., Zeschnigk M, Lich C, Buiting K, Doerfler W, Horsthemke B. A single-tube PCR test for the diagnosis of Angelman and Prader-Willi syndrome based on allelic methylation differences at the SNRPN locus. Eur J Hum Genet. 1997 Mar-Apr;5(2):94-8) the bisulfite technique is only used in research. Always, however, short, specific fragments of a known gene are amplified subsequent to a bisulfite treatment and either completely sequenced (Olek A, Walter J. The pre-implantation ontogeny of the H19 methylation imprint. Nat Genet. 1997 Nov;17(3):275-6) or individual cytosine positions are detected by a primer extension reaction (Gonzalgo M L, Jones P A. Rapid quantitation of methylation differences at specific sites using methylation-sensitive single nucleotide primer extension (Ms—SNuPE). Nucleic Acids Res. 1997 Jun 15;25(12):2529-31, WO Patent 9500669) or by enzymatic digestion (Xiong Z, Laird P W. COBRA: a sensitive and quantitative DNA methylation assay. Nucleic Acids Res. 1997 Jun 15;25(12):2532-4). In addition, detection by hybridization has also been described (Olek et al., WO 99/28498).

[0010] Further publications dealing with the use of the bisulfite technique for methylation detection in individual genes are: Grigg G, Clark S. Sequencing 5-methylcytosine residues in genomic DNA. Bioessays. 1994 Jun;16(6):431-6, 431; Zeschniglc M, Schmitz B, Dittrich B, Buiting K, Horsthemke B, Doerfler W. Imprinted segments in the human genome: different DNA methylation patterns in the Prader-Willi/Angelman syndrome region as determined by the genomic sequencing method. Hum Mol Genet. 1997 Mar;6(3):387-95; Feil R, Charlton J, Bird A P, Walter J, Reik W. Methylation analysis on individual chromosomes: improved protocol for bisulphite genomic sequencing. Nucleic Acids Res. 1994 Feb 25;22(4):695-6; Martin V, Ribieras S, Song-Wang X, Rio M C, Dante R. Genomic sequencing indicates a correlation between DNA hypomethylation in the 5′ region of the pS2 gene and its expression in human breast cancer cell lines. Gene. 1995 May 19;157(1-2):261-4; WO 97/46705, WO 95/15373 and WO 97/45560.

[0011] An overview of the Prior Art in oligomer array manufacturing can be gathered from a special edition of Nature Genetics (Nature Genetics Supplement, Volume 21, January 1999), published in January 1999, and from the literature cited therein.

[0012] Fluorescently labeled probes are often used for the scanning of immobilized DNA arrays. The simple attachment of Cy3 and Cy5 dyes to the 5′-OH of the specific probe are particularly suitable for fluorescence labels. The detection of the fluorescence of the hybridized probes may be carried out, for example via a confocal microscope. Cy3 and Cy5 dyes, besides many others, are commercially available.

[0013] Matrix Assisted Laser Desorption Ionization Mass Spectrometry (MALDI-TOF) is a very efficient development for the analysis of biomolecules (Karas M, Hillenkamp F. Laser desorption ionization of proteins with molecular masses exceeding 10,000 daltons. Anal Chem. 1988 Oct 15;60(20):2299-301). An analyte is embedded in a light-absorbing matrix. The matrix is evaporated by a short laser pulse thus transporting the analyte molecule into the vapor phase in an unfragmented manner. The analyte is ionized by collisions with matrix molecules. An applied voltage accelerates the ions into a field-free flight tube. Due to their different masses, the ions are accelerated at different rates. Smaller ions reach the detector sooner than bigger ones.

[0014] MALDI-TOF spectrometry is excellently suited to the analysis of peptides and proteins. The analysis of nucleic acids is somewhat more difficult (Gut I G, Beck S. DNA and Matrix Assisted Laser Desorption Ionization Mass Spectrometry. Current Innovations and Future Trends. 1995, 1; 147-57). The sensitivity to nucleic acids is approximately 100 times worse than to peptides and decreases disproportionally with increasing fragment size. For nucleic acids having a multiply negatively charged backbone, the ionization process via the matrix is considerably less efficient. In MALDI-TOF spectrometry, the selection of the matrix plays an eminently important role. For the desorption of peptides, several very efficient matrixes have been found which produce a very fine crystallization. There are now several responsive matrixes for DNA, however, the difference in sensitivity has not been reduced. The difference in sensitivity can be reduced by chemically modifying the DNA in such a manner that it becomes more similar to a peptide. Phosphorothioate nucleic acids in which the usual phosphates of the backbone are substituted with thiophosphates can be converted into a charge-neutral DNA using simple alkylation chemistry (Gut I G, Beck S. A procedure for selective DNA alkylation and detection by mass spectrometry. Nucleic Acids Res. 1995 Apr 25;23(8):1367-73). The coupling of a charge tag to this modified DNA results in an increase in sensitivity to the same level as that found for peptides. A further advantage of charge tagging is the increased stability of the analysis against impurities which make the detection of unmodified substrates considerably more difficult.

[0015] Genomic DNA is obtained from DNA of cell, tissue or other test samples using standard methods. This standard methodology is found in references such as Fritsch and Maniatis eds., Molecular Cloning: A Laboratory Manual, 1989.

### Description

[0016] The object of the present invention is to provide a means for the identification of the tissue of origin of cancer cells. The present invention discloses a method and nucleic acids that enable the differentiation of prostate from renal cancer cells. Both forms of cancer are of significant risk, and rank within the top ten most common types of cancer in the United States. Identification of tissue of origin of cancerous cells is of great prognostic and therapeutic significance. However, current methods cannot identify the origin of a significant proportion of cases. Furthermore, commonly used histological and cytological methods require that tissue samples of an adequate size are available. The present invention is based on the discovery that genetic and epigenetic parameters, in particular, the cytosine methylation pattern of genomic DNA, are particularly suitable for the classification, differentiation and/or diagnosis of prostate and renal carcinomas. Furthermore, the described invention enables the classification, differentiation and/or diagnosis of cancer tissues using minute samples which would be inadequate for histological or cytological analysis.

[0017] This objective is achieved according to the present invention using a nucleic acid containing a sequence of at least 16 bases in length of the chemically pretreated genomic DNA according to one of Seq. ID No.1 through Seq. ID No.112.

[0018] The chemically modified nucleic acids (Seq. ID No.1 through Seq. ID No.112) could heretofore not be connected with the determination of disease relevant genetic and epigenetic parameters.

[0019] The object of the present invention is further achieved by an oligonucleotide or oligomer for detecting the cytosine methylation state of chemically pretreated DNA, containing at least one base sequence having a length of at least 13 nucleotides which hybridizes to a chemically pretreated genomic DNA according to Seq. ID No.1 through Seq. ID No.112. The oligomer probes according to the present invention constitute important and effective tools which, for the first time, make it possible to determine the renal cancer and/or prostate cancer specific genetic and epigenetic parameters of chemically modified genomic DNA. The base sequence of the oligomers preferably contains at least one CpG dinucleotide. The probes may also exist in the form of a PNA (peptide nucleic acid) which has particularly preferred pairing properties. Particularly preferred are oligonucleotides according to the present invention in which the cytosine of the CpG dinucleotide is the 5^{th}-9^{th} nucleotide from the 5′-end of the 13-mer; in the case of PNA-oligomers, it is preferred for the cytosine of the CPG dinucleotide to be the 4^{th}-6^{th} nucleotide from the 5′-end of the 9-mer.

[0020] The oligomers according to the present invention are normally used in so called “sets” which contain at least one oligomer for each of the CpG dinucleotides of the sequences of Seq. ID No.1 through Seq. ID No.112 . Preferred is a set which contains at least one oligomer for each of the CpG dinucleotides from one of Seq. ID No.1 through Seq. ID No.112.

[0021] Moreover, the present invention makes available a set of at least two oligonucleotides which can be used as so-called “primer oligonucleotides” for amplifying DNA sequences of one of Seq. ID No.1 through Seq. ID No.112, or segments thereof.

[0022] In the case of the sets of oligonucleotides according to the present invention, it is preferred that at least one oligonucleotide is bound to a solid phase. Moreover it is particularly preferred that all the oligonucleotides of one set are bound to the solid phase.

[0023] The present invention moreover relates to a set of at least 10 n (oligonucleotides and/or PNA-oligomers) used for detecting the cytosine methylation state in chemically pretreated genomic DNA (Seq. ID No.1 through Seq. ID No.112). These probes enable classification, differentiation and/or diagnosis of kidney and prostate cancer tissues. The set of oligomers may also be used for detecting single nucleotide polymorphisms (SNPs) in chemically pretreated genomic DNA according to one of Seq. ID No.1 through Seq. ID No.112.

[0024] According to the present invention, it is preferred that an arrangement of different oligonucleotides and/or PNA-oligomers (a so-called “array”) made available by the present invention is present in a manner that it is likewise bound to a solid phase. This array of different oligonucleotide- and/or PNA-oligomer sequences can be characterized in that it is arranged on the solid phase in the form of a rectangular or hexagonal lattice. The solid phase surface is preferably composed of silicon, glass, polystyrene, aluminum, steel, iron, copper, nickel, silver, or gold. However, nitrocellulose as well as plastics such as nylon which can exist in the form of pellets or also as resin matrices are possible as well.

[0025] Therefore, a further subject matter of the present invention is a method for manufacturing an array fixed to a carrier material for analysis in connection with classification, differentiation and/or diagnosis of kidney and prostate cancer tissues, in which method at least one oligomer according to the present invention is coupled to a solid phase. Methods for manufacturing such arrays are known, for example, from U.S. Pat. No. 5,744,305 by means of solid-phase chemistry and photolabile protecting groups.

[0026] A further subject matter of the present invention relates to a DNA chip for the classification, differentiation and/or diagnosis of renal and prostate cancer tissues, which contains at least one nucleic acid according to the present invention. DNA chips are known, for example, in U.S. Pat. No. 5,837,832.

[0027] Moreover, a subject matter of the present invention is a kit which may be composed, for example, of a bisulfite-containing reagent, a set of primer oligonucleotides containing at least two oligonucleotides whose sequences in each case correspond or are complementary to an 16 base long segment of the base sequences specified in the appendix (Seq. ID No. 1 through Seq. ID No.112), oligonucleotides and/or PNA-oligomers as well as instructions for carrying out and evaluating the described method. However, a kit along the lines of the present invention can also contain only part of the aforementioned components.

[0028] The present invention also makes available a method for identifying the tissue of origin of cancer cells, by ascertaining genetic and/or epigenetic parameters of genomic DNA for the classification, differentiation and/or diagnosis of renal and prostate cancer tissues by analyzing cytosine methylations and single nucleotide polymorphisms, including the following steps:

[0029] Firstly the genomic DNA sample must be isolated from tissue or cellular sources. For humans, such sources may include cell lines, histological slides, body fluids, such as lymphatic fluid, blood, sputum, faeces, urine, cerebrospinal fluid, tissue embedded in paraffin; for example kidney, prostate, or lymphatic system tissue. Extraction may be by means that are standard to one skilled in the art, these include the use of detergent lysates, sonification and vortexing with glass beads. Once the nucleic acids have been extracted the genomic double stranded DNA is used for the analysis.

[0030] In a preferred embodiment the DNA may be cleaved prior to the chemical treatment, this may be any means standard in the state of the art, in particular with restriction endonucleases.

[0031] The genomic DNA sample is then chemically treated in such a manner that cytosine bases which are umnethylated at the 5′-position are converted to uracil, thymine, or another base which is dissimilar to cytosine in terms of hybridization behavior. This will be understood as ‘chemical pretreatment’ hereinafter.

[0032] The above described treatment of genomic DNA is preferably carried out with bisulfite (sulfite, disullite) and subsequent alkaline hydrolysis which results in the conversion of non-methylated cytosine nucleobases to uracil or to another base which is dissimilar to cytosine in terms of base pairing behavior.

[0033] Fragments of the chemically pretreated DNA are amplified, using sets of primer oligonucleotides according to the present invention, and a, preferably heat-stable polymerase. Because of statistical and practical considerations, preferably more than ten different fragments having a length of 100-2000 base pairs are amplified. The amplification of several DNA segments can be carried out simultaneously in one and the same reaction vessel. Usually, the amplification is carried out by means of a polymerase chain reaction (PCR).

[0034] In a preferred embodiment of the method, the set of primer oligonucleotides includes at least two olignonucleotides whose sequences are each reverse complementary or identical to an at least 16 base-pair long segment of the base sequences specified in the appendix (Seq. ID No. 1 through Seq. ID No.112). The primer oligonucleotides are preferably characterized in that they do not contain any CpG dinucleotides. In a particularly preferred embodiment of the method, the sequence of said primer oligonucleotides are designed so as to selectively anneal to and amplify, only the renal and/or prostate specific DNA of interest, thereby minimizing the amplification of background or non relevant DNA. In the context of the present invention, background DNA is taken to mean genomic DNA which does not have a relevant tissue specific methylation pattern, in this case the relevant tissue being renal and/or prostate carcinoma. Examples of such primers, used in Example 2, are contained in Table 1.

[0035] According to the present invention, it is preferred that at least one primer oligonucleotide is bonded to a solid phase during amplification. The different oligonucleotide and/or PNA-oligomer sequences can be arranged on a plane solid phase in the form of a rectangular or hexagonal lattice, the solid phase surface preferably being composed of silicon, glass, polystyrene, aluminum, steel, iron, copper, nickel, silver, or gold, it being possible for other materials such as nitrocellulose or plastics to be used as well.

[0036] The fragments obtained by means of the amplification can carry a directly or indirectly detectable label. Preferred are labels in the form of fluorescence labels, radionuclides, or detachable molecule fragments having a typical mass which can be detected in a mass spectrometer, it being preferred that the fragments that are produced have a single positive or negative net charge for better detectability in the mass spectrometer. The detection may be carried out and visualized by means of matrix assisted laser desorption/ionization mass spectrometry (MALDI) or using electron spray mass spectrometry (ESI).

[0037] The amplificates obtained in the second step of the method are subsequently hybridized to an array or a set of oligonucleotides and/or PNA probes. In this context, the hybridization takes place in the manner described in the following. The set of probes used during the hybridization is preferably composed of at least 10 oligonucleotides or PNA-oligomers. In the process, the amplificates serve as probes which hybridize to oligonucleotides previously bonded to a solid phase. The non-hybridized fragments are subsequently removed. Said oligonucleotides contain at least one base sequence having a length of 13 nucleotides which is reverse complementary or identical to a segment of the base sequences specified in the appendix, the segment containing at least one CpG dinucleotide. The cytosine of the CpG dinucleotide is the 5^{th} to 9^{th} nucleotide from the 5′-end of the 13-mer. One oligonucleotide exists for each CpG dinucleotide. Said PNA-oligomers contain at least one base sequence having a length of 9 nucleotides which is reverse complementary or identical to a segment of the base sequences specified in the appendix, the segment containing at least one CpG dinucleotide. The cytosine of the CpG dinucleotide is the 4^{th} to 6^{th} nucleotide seen from the 5′-end of the 9-mer. Preferably one oligonucleotide exists for each CpG dinucleotide.

[0038] In the fourth step of the method, the non-hybridized amplificates are removed.

[0039] In the final step of the method, the hybridized amplificates are detected. In this context, it is preferred that labels attached to the amplificates are identifiable at each position of the solid phase at which an oligonucleotide sequence is located.

[0040] According to the present invention, it is preferred that the labels of the amplificates are fluorescence labels, radionuclides, or detachable molecule fragments having a typical mass which can be detected in a mass spectrometer. The mass spectrometer is preferred for the detection of the amplificates, fragments of the amplificates or of probes which are complementary to the amplificates, it being possible for the detection to be carried out and visualized by means of matrix assisted laser desorption/ionization mass spectrometry (MALDI) or using electron spray mass spectrometry (ESI). The produced fragments may have a single positive or negative net charge for better detectability in the mass spectrometer.

[0041] The aforementioned method is preferably used for ascertaining genetic and/or epigenetic parameters of genes used for the classification, differentiation and/or diagnosis of renal and prostate cancer tissues.

[0042] The oligomers according to the present invention or arrays thereof as well as a kit according to the present invention are intended to be used for the classification, differentiation and/or diagnosis of kidney and prostate cancer tissues by analyzing methylation patterns of genornic DNA. According to the present invention, the method is preferably used for the analysis of important genetic and/or epigenetic parameters within genomic DNA.

[0043] The method according to the present invention is used, for example, for the classification, differentiation and/or diagnosis of renal and prostate cancer tissues. The nucleic acids according to the present invention of Seq. ID No.1 through Seq. ID No.112 can be used for the classification, differentiation and/or diagnosis of renal and prostate cancer tissues.

[0044] The present invention moreover relates to a method for manufacturing a diagnostic reagent and/or therapeutic agent for the classification, differentiation and/or diagnosis of prostate and/or kidney cancer by analyzing methylation patterns of genomic DNA, the diagnostic reagent and/or therapeutic agent being characterized in that at least one nucleic acid according to the present invention (sequence IDs 1 through 112) is used for manufacturing it, preferably together with suitable additives and auxiliary agents.

[0045] A further subject matter of the present invention relates to a diagnostic reagent and/or therapeutic agent for the classification, differentiation and/or diagnosis of prostate and/or kidney cancers by analyzing methylation patterns of genomic DNA, the diagnostic reagent and/or therapeutic agent containing at least one nucleic acid according to the present invention (sequence IDs 1 through 112), preferably together with suitable additives and auxiliary agents.

[0046] The present invention moreover relates to the diagnosis and/or prognosis of events which are disadvantageous to patients or individuals in which important genetic and/or epigenetic parameters within their genomic DNA, said parameters obtained by means of the present invention, may be compared to another set of genetic and/or epigenetic parameters, the differences serving as the basis for a diagnosis and/or prognosis of events which are disadvantageous to patients or individuals.

[0047] In the context of the present invention the term “hybridization” is to be understood as a bond of an oligonucleotide to a completely complementary sequence along the lines of the Watson-Crick base pairings in the sample DNA, forming a duplex structure.

[0048] The term “functional variants” denotes all DNA sequences which are complementary to a DNA sequence, and which hybridize to the reference sequence under stringent conditions.

[0049] In the context of the present invention, “genetic parameters” are mutations and polymorphisms of genes and sequences further required for their regulation. To be designated as mutations are, in particular, insertions, deletions, point mutations, inversions and polymorphisms and, particularly preferred, SNPs (single nucleotide polymorphisms).

[0050] In the context of the present invention, “epigenetic parameters” are, in particular, cytosine methylations and further chemical modifications of DNA and sequences further required for their regulation. Further epigenetic parameters include, for example, the acetylation of histones which, however, cannot be directly analyzed using the described method but which, in turn, correlates with DNA methylation.

[0051] In the following, the present invention will be explained in greater detail on the basis of the sequences and examples with reference to the attached drawing without being limited thereto.

### DESCRIPTION OF FIGURE

[0052] FIG. 1 Separation of prostate carcinoma (1) and kidney carcinoma (2). High probability of methylation corresponds to red, uncertainty to black and low probability to green. The labels on the left side of the plot are gene and CpG identifiers. The labels on the right side give the significance of the difference between the means of the two groups. Each row corresponds to a single CpG and each column to the methylation levels of one sample. CpGs are ordered according to their contribution to the distinction to the differential diagnosis of the two tumours with increasing contribution from top to bottom.

[0053] Seq. ID No.1 through Seq. ID No.112

[0054] Sequences having odd sequence numbers (e.g., Seq. ID No. 1, 3, 5, . . . ) exhibit in each case sequences of chemically pretreated genomic DNAs. Sequences having even sequence numbers (e.g., Seq. ID No. 2, 4, 6, . . . ) exhibit in each case the sequences of the chemically pretreated genomic DNAs which are complementary to the preceeding sequences (e.g., the complementary sequence to Seq. ID No.1 is Seq. ID No.2, the complementary sequence to Seq. ID No.3 is Seq. ID No.4, etc.).

[0055] Seq. ID No.113 through Seq. ID No.116

[0056] Seq. ID No.113 through Seq. ID No.116 show sequences of oligonucleotides used in Example 1.

[0057] The following example relates to a fragment of a gene, in this case, platelet glycoprotein Ib in which a specific CG-position is analyzed for its methylation status.

### EXAMPLE 1

### Methylation Analysis of the Gene Platelet Glycoprotein Ib.

[0058] The following example relates to a fragment of the gene platelet glycoprotein Ib in which a specific CG-position is to be analyzed for methylation.

[0059] In the first step, a genomic sequence is treated using bisulfite (hydrogen sulfite, disulfite) in such a manner that all cytosines which are not methylated at the 5-position of the base are modified in such a manner that a different base is substituted with regard to the base pairing behavior while the cytosines methylated at the 5-position remain unchanged.

[0060] If bisulfite solution is used for the reaction, then an addition takes place at the non-methylated cytosine bases. Moreover, a denaturating reagent or solvent as well as a radical interceptor must be present. A subsequent alkaline hydrolysis then gives rise to the conversion of non-methylated cytosine nucleobases to uracil. The chemically converted DNA is then used for the detection of methylated cytosines. In the second method step, the treated DNA sample is diluted with water or an aqueous solution. Preferably, the DNA is subsequently desulfonated. In the third step of the method, the DNA sample is amplified in a polymerase chain reaction, preferably using a heat-resistant DNA polymerase. In the present case, cytosines of the gene platelet_glycoprotein Ib are analyzed. To this end, a defined fragment having a length of 379 bp is amplified with the specific primer oligonucleotides GGTGATAGGAGAATAATGTTGG (Sequence ID 113) and TCTCCCAACTACAACCAAAC (Sequence ID No. 114). This amplificate serves as a sample which hybridizes to an oligonucleotide previously bonded to a solid phase, forming a duplex structure, for example GGTTAGGTCGTAGTATTG (Sequence ID No. 115), the cytosine to be detected being located at position 172 of the amplificate. The detection of the hybridization product is based on Cy3 and Cy5 fluorescently labelled prirner oligonucleotides which have been used for the amplification. A hybridization reaction of the amplified DNA with the oligonucleotide takes place only if a methylated cytosine was present at this location in the bisulfite-treated DNA. Thus, the methylation status of the specific cytosine to be analyzed is inferred from the hybridization product.

[0061] In order to verify the methylation status of the position, a sample of the amplificate is further hybridized to another oligonucleotide previously bonded to a solid phase. Said olignonucleotide is identical to the oligonucleotide previously used to analyze the methylation status of the sample, with the exception of the position in question. At the position to be analysed said oligonucleotide comprises a thymine base as opposed to a cytosine base i.e GGTTAGGTTGTAGTATTG (Sequence ID No. 116). Therefore, the hybridisation reaction only takes place if an unmethylated cytosine was present at the position to be analysed.

### EXAMPLE 2

### Differentiation of Cancers

[0062] In order to relate the methylation pattern of a sample to one of the tissue specific cancers, it is initially required to analyze the DNA methylation patterns of samples of carcinomas originating from the two different tissue types. These analyses are carried out, for example, analogously to Example 1. The results obtained in this manner are stored in a database and the CpG dinucleotides which are methylated differently between the two groups are identified. This can be carried out by determining individual CpG methylation rates as can be done, for example, by sequencing, which is a relatively imprecise method of quantifying methylation at a specific CpG, or else, in a very precise manner, by a methylation-sensitive “primer extension reaction”. In a particularly preferred variant the methylation status of hundreds or thousands of CpGs may be analysed on an oligomer array. It is also possible for the patterns to be compared, for example, by clustering analyses which can be carried out, for example, by a computer.

[0063] All clinical specimens were obtained at time of surgery, i.e. in a routine clinical situation (Santourlidis, S., Prostate 39:166-174, 1999, Florl, A. R., Br. J. Cancer 80:1312-1321, 1999). A panel of genomic fragments from 56 different genes (listed in Table 1) were bisulphite treated, and the chemically modified fragments (Sequence IDs 1 through 112) were amplified by PCR. The genomic DNA was amplified using the primer pairs listed in Table 1. However, as will be obvious to one skilled in the art, it is also possible to use other primers that amplify the genomic in an adequate manner. The design of such primers will be obvious to one skilled in the art. However the primer pairs as listed in Table 1 are particularly preferred. Classification of prostate carcinomas and clear cell renal carcinomas could be achieved with a highly significant test error of 6%. Two CpG positions from apolipoprotein C2 and the platelet glycoprotein Ib genes were sufficient, but most other CpGs of the panel showed different methylation patterns between the two phenotypes. Our results prove that methylation fingerprints are capable of providing differential diagnosis of solid malignant tumours originating from different human tissues and therefore could be applied in a large number clinical situations. FIG. 1 shows the application of the described method to distinguish clear cell renal carcinoma from prostate carcinoma.

TABLE 1

List of genes and primer oligonucleotides according to Example 2

| | Genbank Entry No. | | |
|---|---|---|---|
| | (internet address: | | |
| | http://www. | | |
| Name | ncbi.nlm.nih.gov) | Primer 1 | Primer 2 |
| ADCYAP1 | NM_001117 | GGTGGATTTATGGTTATTTTG | TCCCTCCCTTACCCTTCAAC |
| AFP | NM_001134 | AGGTTTATTGAATATTTAGG | AACATATTTCCACAACATCC |
| APOA1 | NM_000039 | GTTGGTGGTGGGGGAGGTAG | ACAACCAAAATCTAAACTAA |
| APOC2 | NM_000483 | ATGAGTAGAAGAGGTGATAT | CCCTAAATCCCTTTCTTACC |
| ATP5A1 | NM_004046 | AGTTTGTTTTAATTTATTGATAGGA | AACAACATCTTTACAATTACTCC |
| ATP5G1 | NM_005175 | TGATAGTTTATGATTGTTGA | AATCTCAACCCTCAACTTC |
| ATP6 | NC_001807 | GGGTATTAGGAATTTATGTG | CAAAACACCTTCCTAACTCA |
| C4B | NM_000592 | ATTGATAGGTAGTTAGATTGG | AAAAAACTCTCATAAATCTCA |
| c-ab1 | NM_007313 | GGTTGGGAGATTTAATTTTATT | ACCAATCCAAACTTTTCCTT |
| CD1R3 | NM_001766 | ATTATGGTTGGAATTGTAAT | ACAAAAACAACAAACACCCC |
| CDC25A | NM_001789 | AGAAGTTGTTTATTGATTGG | AAAATTAAATCCAAACAAAC |
| CDH3 | NM_001793 | GTTTAGAAGTTTAAGATTAG | CAAAAACTCAACCTCTATCT |
| c-fos | NM_005252 | TTTTGAGTTTTAGAATTGTTTTAG | AAAAACCCCCTACTCATCTACTA |
| c-MOS | NM_005372 | TTTATTGATTGGGAGTAGGT | CTAATTTTACAAACATCCTA |
| c-myc | NM_002467 | AAAGGTTTGGAGGTAGGAGT | TTCCTTTCCAAATCCTCTTT |
| CRIP1 | NM_001311 | TTTAGGTTTAGGGTTTAGTT | CCACTCCAAAACTAATATCA |
| CSF1 | NM_000757 | TAGGGTTTGGAGGGAAAG | AAAAATCACCCTAACCAAAC |
| CSNK2B | NM_001320 | GGGGAAATGGAGAAGTGTAA | CTACCAATCCCAAAATAACC |
| CTLA4 | NM_005214 | TTTTTATGGAGAGTAGTTGG | TAACTTTACTCACCAATTAC |
| DAD1 | NM_001344 | TTTTGTTGTTAGAGTAATTG | ACCTCAATTTCCCCATTCAC |
| DAPK1 | NM_004938 | ATTAATATTATGTAAAGTGA | CTTACAACCATTCACCCACA |
| DBCCR1 | NM_014618 | ATTTGGAGTTGAAGTATTTG | AACTATACCCAAACACCTAC |
| EGFR | NM_005228 | GGGTAGTGGGATATTTAGTTTTT | CCAACACTACCCCTCTAA |
| EGR4 | NM_001965 | AGGGGGATTGAGTGTTAAGT | CCCAAACATAAACACAAAAT |
| ELK1 | NM_005229 | AAGTGTTTTAGTTTTTAATGGGTA | CAAACCCAAAACTCACCTAT |
| ERBB2 | NM_004448 | GAGTGATATTTTTATTTTATGTTTGG | AAAACCCTAACTCAACTACTCAC |
| G6E | NM_024123 | AGGTTGGATTTTGGGTAGGT | TCTCTCCTACTCTCCTAATCTC |
| GP1BB | NM_000407 | GGTGATAGGAGAATAATGTTGG | TCTCCCAACTACAACCAAAC |
| HLA-DNA | NM_002119 | GAGGTTAAAGGAAGTTTTGGA | AAACTAAATTCTCCCAATACC |
| HLA-F | NM_018950 | TTGTTGTTTTTAGGGGTTTTGG | TCCTTCCCATTCTCCAAATATC |
| MLH1 | NM_000249 | TTTAAGGTAAGAGAATAGGT | TTAACCCTACTCTTATAACC |
| HSPA2 | NM_021979 | AGAGGAGATATTTTTTATGG | AAAAATCCTACAACAACTTC |
| | | or | or |
| | | AAGGATAATAATTTGTTGGG | CTTAAATACAAACTTAATCC |
| TL13 | NM_002188 | TTTTTAGGGTAGGGGTTGT | CCTTATCCCCCATAACCA |
| 1-myc | NM_005377 | AGGTTTGGGTTATTGAGTTT | CATTATTTCCTAACTACCTT |
| | | | ATATCTC |
| MC2R | NM_000529 | ATATTTGATATGTTGGGTAG | ACCTACTACAAAAAATCATC |
| ME491/CD63 | NM_001780 | TGGGAGATATTTAGGATGTGA | CTCACCTAAACTTCCCAAA |
| MGMT | NM_002412 | TTGTGAGGTATTGGGAGTTAG | ACCCAAACACTCACCAAAT |
| MRP5 | NM_005688 | ATGAGGTGGGAGGATTGTTT | CATCCAAAATTCTAAACTAA |
| N33 | NM_006765 | TGGAGGAGATATTGTTTTGT | TTTTTCAAATCAAAACCCTACT |
| NCL | NM_005381 | AAGTTGTGTTTTTAAAAGGGTTA | AAAAACTAAACCTACCCAATAA |
| NEU1 | NM_016215 | AGGAGGAAGGGTTAATAAAGA | ATCTTCCTACTACTATCTCTAAC |
| NF1 | NM_000267 | TTGGGAGAAAGGTTAGTTTT | ATCCAAACTCCCAATATTCC |
| n-myc | NM_005378 | GGAGGAGTATATTTTGGGTTT | ACAAACCCTACTCCTTACCTC |
| OAT | NM_000274 | TGGAGGTGGATTTAGAGGTA | ACCAAAACCCCAAAACAA |
| POMC | NM_000939 | AGTTTTTAAATAATGGGGAAAT | ACTCTTCTTCCCCTCCTTC |
| PGR | NM_000926 | AGTTGAAGTTATAAGGGGTG | AATAAAAACTCTCAAAAACC |
| RD | NM_002904 | AAGAGTGAGAAGTAGAGGGTT | CTACTCTCTAAAACTCCAAAC |
| SOD1 | NM_000454 | AGGGGAAGAAAAGGTAAGTT | CCCACTCTAACCCCAAACCA |
| TGFA | NM_003236 | GGTTTGTTTGGGAGGTAAG | CCCCCTAAAAACACAAAA |
| TGFB1 | NM_000660 | GGGGAGTAATATGGATTTGG | CCTTTACTAAACACCTCCCATA |
| TNF-beta | X02911 | TTTTTGTTTTTGATTGAAATAGTAG | AAAAACCCCAAAATAAACAA |
| TSP | NM_003246 | TGGTATTTTTGAGGTAGATG | CCCTATCTTCCTACACAAAC |
| UBB | NM_018955 | TTAAGTTATTTTAGGTGGAGTTTA | ACCAAAATCCTACCAATCAC |
| UNG | NM_003362 | GTTGGGGTGTTTGAGGAA | CCTCTCCCCTCTAATTAAACA |
| VEGF | NM_003376 | TGGGTAATTTTTAGGTTGTGA | CCCCAAAAACAAATCACTC |
| WT1 | NM_000378 | AAAGGGAAATTAAGTGTTGT | TAACTACCCTCAACTTCCC |

The application's sequence listing, which the Patent Office published only in electronic form, follows.

SEQUENCE LISTING (116 sequences)

SEQ ID NO: 1 - DNA, 3953 bp, Artificial Sequence
  chemically treated genomic DNA (Homo sapiens)
agtaggagggtaggagagaattttgtatagttggttacggtgttttatttaagggtttaatttggggttttattataaaagttgtagtaaaattgttaaaaataggaattattgggggtgggggttttgttttttttgtttagttattattttttttttttaatttttattttggtttatattacgtgtttttagaagaaacgttttgagtaggggttggtatgagattgtttttttttttaggatttatttttttttatgattaggttggtgattttttttttagggtgttagtgttatttattgagtagatgtttggtaggtgtttgttatgtgttagatttagtaggggatagagttttttcgatatagatggattagtatgtttggatataaattgtgaaaggagttgttaatttttttgtgtaaaatttatttttgcggttatcgttaatatttttatatatgttagggtatttagggttaggatttggtaattttgtttaggagtagtcgttttggagatttttaagacgagggaaagaaatgggtggaaataggggtttatattgtgggtttcgtagttattaaatagtttaattcgtggttattgagtgttttgaataatgtttggttggattttgagtttgagtgtgttattaatttagtttgttattgtcgttgttgttgttatgtatttttttattagttttgtttagaaagattttttttttttttaaaatattagtaaagggggtttagattagtttaagttaaatattttgtaataaaatggagtagttattttggtgaataagtatatttagaaaaggaaattgtttgtttggtaagatgttgtttaatagtattttttattttgatgtttcgtagtttttgagttaggaaattgagaagtttttgattagattgtaaaggttgtaggtttcgtaagggtgtaaggttatttttaaagaattagaagttaggtttttcgatttttatttttgttagcgttaaatagtaatcgttgaaggatgtagggtagttgtgagttgtagtttttttataggtaaaaattataagggtaaaatttggtttttagttttatagggatattttaagttgtgaaagtgttttggttataaagaattgcgtaaatgttaaatattaggtttagttataataattattttagtaataaattaaagagaagggtgaaatattggtaagtattttggagtttaattagtaagtttttgagatttttttatgtgttgattgggataaattttattttttaaaagaaaagacgtttttttggttcgagatatttgtgagttgttttagtaggggattagttatttttttattttttaaagttatagatagttgggatggttaagtaggtagtttaggttgatggtttattaaggttatttttttgtttatatagttttatagatatttggggttattttagttttagaaaagatgttttatattttagtaattgtaagttaaggataagtagagagatgtgggattgttgtttttatgtttgttgtagaagttgaggttttagatttgataaagtaagtgtagtgggaataagggaatatattattagaaattgggattttagaaaatagaatagttattgtttattaagtgttaggtatttttttaatagttttgtatatatgtttaaagtttatgtttaaaacgatataaatttattattttatagttatggaggatagaagtttaaaatgggttatattgggttaaaattatggtggtagtagagttgtgtttttggaggttgtagggaaaaatattttgttttttttagtttttagggaagggttgtttatgttttttagtttatggtttttttttagtagttacgagtttgatttttattgttatttttatatttttttttttgattttgaggttattgttttttttttgtataattaaggatttttgtgatgataatgggtttatttggagaatttaggttaattattttatttttaggtttttaattatattagtaaaatttttttttgttatggaaggtagtaaagttataggttttagggatgaggttgtggatatttttggggagcgttattttgtttgttatatagtaatttttgttataatttagggcgatggtatattttattattatttttaattagaaattgatgtgtggggaggtgatgtattataatttatttagggttaggtagttggatttgaatttgtttgatttttagatttgaggttttttggttttagaattttttttgaagtgaaaggtatgaggtcgattattttttgatttggtaaatagagatgttagtttggtttttagtgttagggagttttttggagtgatggtatagggtatatttttgttttgtattttaagtttagagattgggttttaggtttagttttttttttaattttttgagagatgatagtttttgggtaaagtttttttgtgttttttagtttttttatttgtgagatggtggtatggggagaggttggagtgatgttatagttttttttagtttgtattataggttttaggatttaggttttattagtaatttgttgggggaggtttgggttttttaggagaaatttgataagatggtgttgtaaatattaacggatatatagtattttatatttataggttgttttaggggtttttaataattttgattatttttgttttattttgtagatagaaaatcgaggtttagagagattatataatttgtttacgatttttttttagtaagatggaggttaagtgaaatgagaaagtaggttttttgttattttttttgtttagaggttttttttttatattagggttttttaagggttgagatttagttatatttgtgcgtgattaaatataagtgtgaataatgtaaagggagacgtttttaatttaaggggttttaattttgtaatgtaattttgagattatgtttttttttgttaaagttttttttttttgaagtgatggttattgtagatggtgagggttttttggaggcggataatatttttatatgataaaattaaaagttggtagtttcgaattgatttttggagtgttttgaaatgtaagaggttttcgaaattttagtttgggagttacggagggtttttttttttttttaggtttattagtttgggaggtttggagagaggtttggaggatttgttggggattaaagaagagtattggtgggaggatagggcgggggaagggggaggggagtgaagtagtttttttggaatgttggtggtgggggaggtagtttttttggtggaggagttttagcgttttttttttttttttttttgttaatataatggataatggtaattgtttatatatttttatggaggggaaggggatgagtgtagggaatttcgattttattcgggagatttgtaagtttgtagatatttttttttcgtttttattgaatttttgatttttgttttgtagttttcgtagtttgttgtttgtttattttatttgtttagttttagggatagagttgatttttgaatttttaagttttatattgttaggattagtgagtagtaatagggtcggggttgggtttattagttttttagtttagattttggttgtagatataaataggttttgtaagagttggttgtttagagattgcgagaaggaggtgcgttttgttgtttgtttcggttattttggttttttagtttaaggtttaggttttgttttaggtcgggtttttgggtatttgaggttttttttcgttttgtgtttttttttttatttggttgtaatgagtgggggagtacggggtttttgtatgttgaaggtattttatttagttaggtttttttttttttttagg

SEQ ID NO: 2 - DNA, 3953 bp, Artificial Sequence
  chemically treated genomic DNA (Homo sapiens)
tttggaggagaagaagggtttggttgagtggggtgtttttagtatgtagaagtttcgtgtttttttatttattgtagttaggtgaggagaagggtatagagcgggagaagattttaggtatttagaggttcggtttggggtaaggtttgaattttgagttggggagttagagtgatcggggtaggtagtaggacgtatttttttttcgtagtttttaagtagttagtttttgtagggtttatttatgtttgtagttagggtttgggttgggaggttgataagtttagtttcggttttgttgttgtttattggttttggtaatgtggaatttaagagtttaaggattagttttgtttttggggttgggtaaatagagtgggtaaatagtaagttgcgggggttgtagggtaggggttaagggtttagtgggggcgggaggggagtgtttgtaggtttgtaggtttttcgggtggggtcggggttttttgtatttattttttttttttttatgggagtgtgtgggtagttgttattgtttattgtgttggtagaggaggggaggggagggacgttgggatttttttattaaggagattgttttttttattattagtattttagggagattattttattttttttttttttttttcgttttgtttttttattagtgtttttttttagtttttagtaggttttttaggtttttttttaagttttttaaattggtaaatttggggagaggggagagtttttcgtggtttttagattgaggtttcggagattttttgtattttaaaatattttagagattaattcggagttgttaatttttaattttgttatgtaaagatattgttcgtttttaaaaaatttttattatttatagtgattattattttaaaaaggaaaggttttaataaaaaagggtataattttagaattatattatagaattgaagttttttagattgaagacgtttttttttgtattgtttatatttatatttgattacgtataggtgtgattggattttagtttttgggaagttttggtgtggggagaagatttttgggtaaaggaagtggtaggagatttgtttttttattttatttggtttttattttgttggaggaagatcgtgggtaagttatataatttttttgagtttcggttttttatttgtaaaatggggtaagaatggttagggttgttggaggtttttgagatagtttgtgaatgtaaagtgttgtgtgttcgttggtgtttgtagtattattttgttaggttttttttggaaggtttagattttttttagtaggttattgataggatttgagttttagagtttgtgatgtaggttgagaggaattgtgatattattttagtttttttttatgttattattttatagatgaagagattgaagagtatagagggattttgtttagaggttgttattttttagggagttagaagaaaggttggatttagaatttagtttttggatttgggatgtagggtagaaatgtattttgtattattattttaggaaattttttaatattagaaattaggttgatatttttgtttattagattagggagtggtcggttttatgttttttattttagagaagattttggagttagaaaattttaaatttaagggttaggtaggtttaaatttagttgtttgattttggatgagttatgatatattatttttttatatattagtttttgattgaagataatgatagaatatgttatcgttttgagttatggtaggggttattgtgtggtaagtagaataacgttttttaaagatgtttatagttttatttttggaatttgtggttttgttattttttatggtaaaaaaagattttgttagtgtgattaaggatttggagatggggtggttggtttggattttttaggtgggtttattgttattataggggtttttaattatataagagggaggtagtggttttagagttagagaaagagatgtgaggatggtagtggagattagattcgtgattgttggaagggggttatgagttgagggatatgagtaatttttttttagaagttggagaaggtaaagtatttttttttgtagtttttaggagtatagttttgttgttattatgattttagtttagtatgatttattttggatttttgttttttataattgtaagataataaatttgtatcgttttaagtatgaattttgaatatatatgtaaaattgttagaaaggtatttagtatttagtaaatagtaattattttgttttttagaattttagtttttggtaatgtatttttttatttttattatatttgttttattagatttgagattttagtttttgtagtaggtatgaaggtagtagttttatatttttttgtttgtttttgatttgtagttgttgagatatggaatattttttttaggattgaagtggttttagatgtttatgggattgtgtagatagggaggtggttttggtgagttattagtttgggttgtttatttgattattttagttgtttgtagttttagaaagtgggaaggtggttggttttttgttgggatagtttataggtgtttcgggttaagagagcgtttttttttttggggggtagagtttgttttagttagtatatgggggaattttagaagtttattggttggattttaagatatttgttagtgttttatttttttttttggtttgttattaaaatgattgttatggttaaatttagtatttaatatttgcgtagttttttgtggttaaagtatttttataatttagaatatttttataaggttggaggttagattttatttttgtgatttttgtttgtgggaaaattgtagtttatagttgttttgtattttttagcggttattatttagcgttggtaggggtgggaatcgggaggtttggtttttagttttttgagggtggttttgtatttttgcggagtttgtagtttttgtagtttgattagggattttttagttttttggtttagggattgcgaggtattaggatagggggtgttgttgaatagtattttattaagtaggtagtttttttttttaaatatatttatttattagggtggttattttattttattgtaaggtatttggtttaaattagtttaagttttttttattaatattttggaaaggaaggaggtttttttggatagagttgatggaaaaatatataataataataacgataataataaattgggttgatgatatatttagatttagggtttagttaggtattgtttaaggtatttagtggttacgggttggattgtttggtggttgcggggtttatagtgtaggtttttgtttttatttatttttttttttcgttttgggagtttttagagcgattgtttttgaatagggttattaagttttggttttggatgttttgatatgtgtaggagtgttggcggtgatcgtaagagtggattttgtatagaaagattagtaattttttttataatttatgtttaaatatattggtttatttgtatcgggaggattttgttttttgttaggtttggtatataatagatatttgttaaatatttgtttagtgaatggtattggtattttagagggagggttattagtttggttatagggaggagtgggttttgggaggggaggtagttttatattagtttttgtttagaacgttttttttgggagtacgtggtatgagttagaatgagagttagggaggggaggtggtgattgagtaggggagataggatttttatttttagtagtttttatttttggtaattttgttgtagtttttgtgatagagttttaagttagatttttgggtggggtatcgtagttagttatgtaagatttttttttgtttttttgtt

SEQ ID NO: 3 - DNA, 7432 bp, Artificial Sequence
  chemically treated genomic DNA (Homo sapiens)
atttgaagttagagttatttagaggagaaagagttggaattgagaatttaaggaatgtttggaagtgatcgggttcgagtttatttaggaagaaatagaggttggagatatgagattgtgttgttatttttttttattaatttttgggttttattgaggttttattataagtttggttttgtagtttagtgattaggagaaattagatataagataataataatagtaatgattttttttttttttttgagacggagttttgttttttcgtttaggttggattgtagtggcgcgatttcggtttaatgtaagttttattttttaggtttacgttatttttttgttttagtttttcgagtagttaggattataggcgtttgttattacgtttggttaattttttatatttttagtagagatggggttttatcgtgttagttaagatggttttaattttttgatttcgtgattcgtttgtttcggttttttaaagtgttggggttataggtatgagttatcgcgtttggttaatagtaatgatttttgagtatttatattgttagtttttacggtaagagttttttttattttttgttttgttttgttttaagatagagttttgttttgttatttaggttggagtgtagtggtgtgatcgcggtttattgtagtttttatttttcgggtttaagttatttttttgttttagttttttaagtagttgggattataggtacgtattattatttttggttaatttttgtatttttagtagggatagggttttttattatgttggttaggttggttttaaatttttggttttatatgatttgtttatttcggttttttaaagtgttgggattataggcgtgagttattgcgtttttttttgtatttgtttaagtaatatattgaaatatgtattgtgttttttattttatggaggaggaaattgaggttagtaaatgaggttgttatgggaggtggagataggatttgaatttgttttagtgtaggaggtttaagagtttttgtttttttttagggtattgtgtgggagggtgagaaggagggaggtttatagaggtatgatttttgattgttattgttatttgggttttgttttttgaagtttttgttaagcggggaggtggtcgggggagggttttgttttgtgtagttttttttttttcggttcgtagagttgagtatagagggatagaggtacggaatttttagaaatgtttttttttagaaataggttttaggttttgtttgttttgtgtttttgcgtgttggttttggtttgtattgggggtgagaagaagtgggtggagggatgtggggtttatatttggtgggtgtgagtgtggttgtgtgttttgtggttttgtagttacgtgagatatgagtacggagtgtgtgcgttttatggcgtgcgtatgtatgtgcgtgtcggggagtgtgtgtgtcggtggttgagagtgaagtgtgaatgttatattggtataaattgggattatttgtgtgtgtgtacgtgcgtgcgtggaagtgggagtatgtagtcgtggtaaaaaagtgtatgtttgtgtgtatatgtgtatttgtgtgtatttgtttttttgtggggtatgtgtgtgtaaaatatttgagtgtgtggatatgtgtgagggggtgagtgtgtgttggtgtgtacgtttgtgttttgtatatgtatttttttttttttttttgagacggagttttattttgttatttaggttggagtgtagtggtagtagtggtgcgattttggtttattgtattattcgtttattcgttttaagggatttttttgttttagtttttagagtatttgggattatagatatacgttattatgtttggttattttttttttttgagacggagtttcgttttgttatttaggttggagtgtagtggcgtgattttggtttattgtaacgttcgtttttcgggtttacgttatttttttgttttagtttttcgagtagttgggattataggagtttattattacgtttggttaattttttgtatttttattagagacggggtttcgtcgtgttagttaggatggtttttatattttgatttcgtgattcgtttgtttcggttttttaaagtgttaggattataggcgtgagttattgcgtttggttaatgtttggttaatttttttatatttttggtagagatagggttttgttatgttgtttaggttggttttgaaattttgattttaggtgattcgttcgttttggttttttaaagtgttgggattataggtatgagttattacgttcggttatgtattttatgttaaaatgggattatattttagattagtattatttagtagaaatttaaatttttaatatagggttaggtacggtggtttatgtttgtaattttagtattttcggaggtcgaggcgggtggatcgtaaggttaggagatttgagattattttggttaatagatgggtaaaaatttatttttattaaaaatataaaaaattagttatgtatggtggtatgcgtttgtagttttagttattcgggaggttgaggtcggagaattatttgaattcgggaggtagaggttgtagtgagtcgagatcgcgttattgtattttaatttgggtgatagagcgagatttcgtttgaaaaaaaaaaaaaatttaatacgtatgtagataatgtgtaaggtattattttatgtgtatcgtatgtagtaatttttaatttttacgataattttgaggtagatattattatttcgttttataaaaggagaaatagttttggggagataggataagttatcggttaaggtatatagttagttatatgtggttttcgcgtgacggttggtttttgtaggcgaggttttgtttagatgcgtgggtagaaggtttggttcggaaagaggaattgatagtaaggttaagttaatgtttgtttttgggggtagaaagttattttttgttttttttttattgtttatagaggtagtttagatagggtgggggttataggagaacgaagggagaagggggtagtttttgggtagtaaaattaggtggtgaagggaggtattagaggatggtaattagagaggttattagaggggaattataggtagatagggtgataggagggattattgatataaggtgaagagatggtttagtcggacggggtggtttatatttgtaattttagtattttgggagttcgaggtgggtggattatttgaggttaggagttcgaggttttaatatggtaaaattttattttttttaaaaatataaaaattagtcgggtatgatggtagatgtttgtaatttttgttattcgggaggttgaggtaggaaaattgtttgaatttaggaggtggaggttgtaatgagacgagattatgatattgtattttattttgggtaatagagtaagagattgattttgttttataaaaaaaaagaaaaaagaaaaaaaaaaagagatggttgatggttaaagaggggttagcggttaggggatatataagggtaaaggtaggaggtaagaggattggtagggggttgtttttgggttatcgggagcgatataggatgagtatggagggaaagggagaaggggattttagggttttagtttatttaagttgttttttggttttatttagtatgttagttagaggtttaggaaggaattttgagttttttattaaagttaaagatgagtcgttggagtttggtgaggggtaggatgaaggagttgttggagatagtggtgaataggattagagacgggtggtaatggttttggtgagggtgtgttgggttgggtggtgggaggggatttttgggtttgagggaggaggggttggggtttggatttttgagttttagggaggaggaaagggtgggagtggggttgtgatttttaggtttgggaggagtggagggttagagttgagagtaggaatttttaggttatagagaggagcggataaatggggtagagaatatttggggagagttggggtttttattgtgatgtttttttttttgtaggagttcgagtatttttcggggttttatgtagatttattatgacgattatttgagggatttgggttcgtttattaaggtttggtttttcgaatttaaagatagttttttgaagaagatttatagtttgtgttttaggtttgtttgtggggataaggattagggttaaaatgtttataaaagttaggtgtggttgtggcgggtgtttgtagttttagttatttaggaggttgaggtaggatgatggtttgagtttaggagttcgagattagtttgggtaatatagcgagattttttgggggtaaaataaaaagaaaaaaaaaagtttatatttttttaataaataaagttttatttgtgtttttgtttggatttttttttagtgtggttagaaaaaaatttattttattgttttttaggaattaatgagtagaagaggtgatatttgatggggaaggaagagtagggaggtcgggaagggtattaaggaataatattttattgtgggtttgcggagaatgggggattttaaggcgtgttagttttaggagggtgagggtaggagcgtgggtggagttagtaggtttttatgatggtttttattgagagtttcgtttttgttttttataagttttgattttatttttagtgggtatttagtatttttaatttttttatagtttttaatttagtttttgtcggaggcgaatttttagagtgagggttttttgttatttgagagaaggttttttgtgacgtgattttgggggacgttattgttttttttgtttttatttatttttttcgtagttttgttggttaggattttggtttagataaaggatgggggttgtggttgtggagcggaagtgggttttaattattataaattttttttgtgttcgttcggagttggtgaggatagtttgttagagtttggtaagaaagggatttagggtgcggggataggggggcgttagtagggagagggtaaagatcgataaagtaggaattttaagaggtataatattagaagttcgtgttggaattatgattgtgtgtgtgtgtgtgtgtgtgtgtgtgtgtgtgtgtgtgtgtgagagagagagagagggagatggagtttcgttatgtagtttaggttagatttaaatttttgggtttaagtaatttttttgttttagtttttttagtagttgggattataggtgtattattatattttataaattatagaatttagaattgtagattatttgagtttttgtttagagttagggtggttgaggtggggaggattttttgagtttaggagtttgaggatgtagtgagttgtgattttgttatcgtgttttagtttgggtgatagagaaattttatttttaaaaaagagaaagaaaaagggataggtataatggtttatgtttgtaattttagtattttgggaggtcgaggcgggtggattatttgaggttaggagttcgatattagttttattagtatggtgaaatcgtatttatattaaaaatataaaaattggtcgggtgtggtagtatatgtttgtaattttagttattttagaggttgagataggagaattgtttgaatttaggaagcggaggttgtagtgagtttagatcgtgttattgtattttagtttgggtgatagagtaagatttagttttggcggaaaaaaagaatgaaaaaatttaaaaaattaaaaaagaattgtaggttgggcgtggtggtttatatttgtaatttaaacgttttgggaggttaaggtaaacggattatttgatgttaggagttggagattagtttggttaatatggtgaaatttcgtttttattaaaaatataaaaattagataggtatggtggtgtatgtttgtatttttagttatttaggaggttgaggtaggagaatcgttcgaattcggaagatagaggttgcggtgagttaaaattgcgttatcgtattttagtttgggcgagagaataagattttgttttggaaaaaaaaaaagaattgtagattatttgtttgtgtttttttttcggggattagattttattttttttttgtcgtatttttttattttttacgtgtggatgatgatattgtgttttgtgtatgtttttcgttattaaaagtgttttttttatagagtaggtgagaatttagtgaggagatgtagggatatgaggtttgatttagggtagagttttaaggtaatatatttgatttattgtaggtttttaatggtgtttgtagagtatttttttgtattgatttagttttagtaaagggtagaggttttgttgtgttttttgttgggtttagaattgtttaggtgtttaagaaagttttttaggttgggtttagtggtttatatttgtatttttagtattttggggaggtcgagatgggaggatcgtttgagtttaggagttttagattagtttgggtaataaaataagttttttatttttataaaagaataaaaattagtagttgggtatggtggtttatgtttgtaattttagtattttgggaggttaaggtaggtaaattatttgaggttaggagtttaagattagtttggttaatatggtgaaattttatttttattaaaaatataaaaattaggtggggtatagtggtttaagtttgtaattttagtattttgggaggttaaggtgggcggattacgaggttagaagttcgagattagtttggttagtatggtgaaattttatttttattaaaaatataaaatattagtcgggtatggtggtaggtgtttgtgattttagttttttgggaggttgaggtagaagaattgttagaattttggaggtagaggttgtagtgagtcgagaatacgttattgtattttagtttgggtgatagagcgagattttattttaaaaaatacgaaaataaaaattagtcgggtggtggcgggtgtttgtaattttagttattggggaggttgaggtaggagaattgtttgaatttgggaggtgggggttgtagtgagttaagattgtattattgtattttagtttgggtaatagagtgagattttattttaaaaaagaaaaaaataataattaaaatgttaaaattaggagtagaattatagaatgttggaaagtgaggtttaagaagggggttgtgtttaagtttatgtatgggaaatttgattgggatatcgagtttatatagagtaggattttagttttttttattagagtggggcgtgattataggaatagtcgtttttagttagtttgttatatgatatttttttaatgttttagg

SEQ ID NO: 4 - DNA, 7432 bp, Artificial Sequence
  chemically treated genomic DNA (Homo sapiens)
tttggaatattgagggggtgttatgtggtaggttgattggaggcggttgtttttgtggttacgttttattttggtgggggggattgagattttgttttgtgtgagttcggtgttttagttaagttttttatgtatggatttggatatagttttttttttgggttttattttttaatattttgtgattttatttttgattttaatattttaattattattttttttttttttgagatggaattttattttgttgtttaggttggagtgtagtggtgtaattttggtttattgtaatttttattttttaggtttaagtaatttttttgttttagtttttttagtagttgggattataggtattcgttattattcggttgatttttgttttcgtattttttgagatggagtttcgttttgttatttaggttggagtgtagtggcgtgttttcggtttattgtaatttttgtttttagggttttagtaatttttttgttttagttttttaaggagttggaattataagtatttgttattatgttcggttaatattttgtatttttagtagagatggggttttattatgttggttaggttggtttcgaatttttgatttcgtgattcgtttattttggttttttaaagtgttaggattataggtttgagttattgtgttttatttgatttttgtatttttagtagagatggggttttattatgttggttaggttggttttgaatttttaattttaagtgatttgtttgttttggttttttaaagtgttggaattataggtatgagttattatgtttagttgttaatttttatttttttgtagagatgggagatttgttttgttgtttaggttggtttggaatttttgggtttaagcgatttttttatttcggtttttttagggtgttgggagtataggtgtgagttattgagtttagtttagaaggtttttttgagtatttaaatagttttgggtttagtagggaatatagtaaagtttttgttttttgttaaggttgagttagtgtagggaggtgttttgtagatattattaaggatttatagtagattaaatgtgttattttagggttttgttttaagttagattttatgtttttgtatttttttattgagtttttatttgttttatgagagaggtatttttggtgacgaagaatatgtatagggtataatattattatttatacgtaggagatgaggaagtacggtagaaagagggtgagatttgattttcggagaaagaatataagtaaatggtttataattttttttttttttttaagataaggttttgttttttcgtttaggttggagtgcgatggcgtaattttggtttatcgtaatttttgtttttcgggttcgagcgatttttttgttttagttttttgagtaattggaaatataagtatgtattattatgtttgtttaatttttgtatttttagtagagacggggttttattatgttggttaggttggtttttaatttttgatattaagtgattcgtttgttttggttttttaaagcgtttggattataagtgtaagttattacgtttagtttatagtttttttttagttttttaaatttttttatttttttttttcgttaagattgagttttgttttgttatttaggttagagtatagtggtacgatttgggtttattgtaattttcgttttttgggtttaagtaatttttttgttttagtttttggaatagttgggattataggtatatgttattatattcggttaatttttgtatttttagtatagatgcggttttattatgttggtaaggttggtgtcgaatttttgattttaagtgatttattcgtttcggttttttagagtgttgggattataggtatgagttattgtatttattttttttttttttttttttttagaaatggggtttttttgttatttaggttggaatacggtggtaagattatagtttattgtatttttaaatttttgggtttaagggattttttttattttagttattttaattttaagtagaagtttaaatagtttatagttttaaattttgtgatttgtggagtgtggtggtgtatttgtagttttagttattggggaggttgaggtaggaggattgtttgagtttaggagtttgagtttagtttgggttatatagcgagattttattttttttttttttttttttatatatatatatatatatatatatatatatatatatatatatagttatggttttaatacgggtttttaatattgtgttttttaaaatttttgttttatcgatttttgttttttttttgttgacgtttttttgttttcgtattttgagttttttttttattagattttggtaggttgtttttattagtttcggacgggtatagagaggatttatagtggttgagatttattttcgttttatagttataatttttattttttgtttaggttaaagttttggttaatagaattgcggagggggtgggtggggatagaaagggtaatgacgttttttaaggttacgttatagggaatttttttttaagtgatagggaatttttattttgagaattcgttttcgatagaggttgggttgggggttgtggaggggttggaggtgttgggtgtttattgggaatggagttagagtttgtaggagataagggcgaagtttttagtgagggttattatggggatttgttgattttatttacgtttttgtttttatttttttgaaattgatacgttttgaagttttttatttttcgtaagtttataatagggtgttattttttgatatttttttcgatttttttatttttttttttttattaggtgttattttttttatttattgatttttgggaggtagtggggtgggtttttttttggttatattggggaaggatttagatagggatataggtgagattttatttattggagaagtatgaatttttttttttttttttgttttatttttaagagatttcgttgtgttgtttaggttggtttcgaatttttgggtttaagttattattttattttagttttttgagtagttgggattataggtattcgttataattatatttggtttttatgaatattttaattttggtttttgtttttatagataagtttggggtataggttgtgggttttttttaagaggttgtttttggattcgaggaattaggttttggtgagcggatttaggttttttaggtggtcgttatagtaggtttgtatgaagtttcggaaggtgttcgggtttttataggagagaggatattatagtggaggttttagttttttttaggtgttttttgttttatttattcgtttttttttgtgatttaggagtttttgtttttagttttaattttttattttttttagatttaggggttatagttttatttttattttttttttttttttgagatttaggggtttaggttttagtttttttttttttagatttaggagtttttttttattatttagtttagtatatttttattagaattattgttattcgtttttggttttgtttattattgtttttagtagtttttttattttgttttttattaggttttagcgatttatttttagttttggtggggggtttagggtttttttttgggtttttggttggtatgttaggtggaattagagggtaatttgggtaggttgggattttagaatttttttttttttttttttttatgtttattttgtgtcgttttcggtggtttaggggtagttttttgttagtttttttgttttttgtttttatttttatgtgttttttgatcgttaatttttttttaattattagttattttttttttttttttttttttttttttttttatgagatagagttagttttttgttttgttgtttagggtggagtgtagtgttatgatttcgttttattgtaatttttattttttggatttaggtaatttttttgttttagtttttcgagtagtagggattataggtatttgttattatgttcggttaatttttgtatttttagaagagatggggttttgttatgttggggtttcgaatttttgattttaagtgatttatttatttcgggtttttaaaatgttgggattatagatgtgagttatttcgttcggttgggttatttttttattttgtgttagtagttttttttgttattttgtttgtttgtggtttttttttaatggtttttttaattgttattttttgatgtttttttttattatttgattttgttgtttaggaattattttttttttttttcgtttttttgtgatttttattttgtttgagttatttttgtggatagtggagggagagtaggaggtgattttttgtttttaggggtagatattggtttagttttgttgttagttttttttttcgggttagattttttatttacgtatttggataaagtttcgtttatagagattagtcgttacgcgggggttatatgtagttagttgtgtgttttggtcggtgatttattttgtttttttaggattgtttttttttttgtagaacggggtaataatatttattttagggttatcgtgagaattaagagttattatatacgatgtatatggaatggtgttttgtatattgtttatatacgtgttaaatttttttttttttttagacggagtttcgttttgttatttaggttggaatgtagtggcgcgatttcggtttattgtaatttttgtttttcgggtttaagtgatttttcggttttagtttttcgagtagttgggattataggcgtatgttattatgtatggttaattttttgtatttttagtagagatgggtttttatttatttgttagttaggatgattttaaattttttgattttgcgatttattcgtttcggttttcgaaagtgttgggattataggtatgagttatcgtgtttggttttgtattaaaaatttaaatttttattggataatgttgatttagaatatgattttattttaatataaagtatatggtcgggcgtggtggtttatgtttgtaattttagtattttgggaggttaaggcgggcggattatttgaggttaggattttaagattagtttgggtaatatggtaaaattttgtttttattaaaaatataaaaaaattagttaggtattggttaggcgtagtggtttacgtttataattttagtattttggaaggtcgaggtaggcggattacgaggttaggatatggagattattttggttaatacggcgaaatttcgtttttagtaaaaatataaaaaattagttaggcgtggtggtgggtttttgtagttttagttattcgggaggttgaggtaggagaatggcgtgaattcgggaggcggacgttgtagtgagttaagattacgttattgtattttagtttgggtaatagagcgagatttcgttttaaaaaaaaaaaatagttaggtatggtggcgtgtgtttgtagttttaaatattttgaagattgaggtaggagaattttttgaaacgggtaggcggatgatgtagtgagttaagatcgtattattgttattattgtattttagtttgggtgatagagtgagatttcgttttaaaaaaaaaaaaaaaaatgtatatgtaaaatatagacgtatatattagtatatatttatttttttatatatgtttatatatttaaatattttgtatatatatattttatagagagataggtgtatataaatatatatatgtatatagatatgtatttttttattacgattgtatatttttatttttacgtacgtacgtgtatatatatagatgattttagtttgtattaatgtgatatttatattttatttttagttatcgatatatatatttttcgatacgtatatgtatacgtacgttatgaaacgtatatatttcgtatttatgttttacgtggttatagagttataggatatatagttatatttatatttattaggtgtgggttttatatttttttatttatttttttttatttttaatgtaggttaggattagtacgtagaggtatagggtaggtagggtttggagtttgtttttgaggagggatatttttgggggtttcgtgtttttgtttttttgtgtttaattttgcgggtcgggggaggggaggttgtatagagtagggttttttttcggttattttttcgtttggtagagattttagagagtagggtttaggtgatagtggtaattagaggttatgtttttgtgggttttttttttttttatttttttatatagtgttttgagagaagatagaggtttttgagttttttgtattgaggtaggtttaaattttgtttttattttttatgatagttttatttgttggttttagtttttttttttataaagtgggaggtatagtatatattttagtatattatttgaataaatataaagaaaggcgtagtggtttacgtttgtaattttagtattttgggaggtcgaggtgggtagattatatgaggttaggagtttgagattaatttggttaatatggtgaaaaattttgtttttattaaaaatataaaaattagttagaagtagtgatgcgtgtttgtaattttagttatttgggaggttgaggtaggagaatggtttgaattcgggaagtgaaggttgtagtgagtcgcgattatattattgtattttagtttgggtgatagagtaagattttgttttgaaataaaataaaataaaaaatgaagaaagtttttatcgtggagattggtaatataggtgtttaaagattattgttgttggttaggcgcggtggtttatgtttgtaattttaatattttgggaggtcgaggtaggcggattacgaggttaggagattgagattattttggttaatacggtgaaattttatttttattaaaaatatgaaaaattagttaggcgtggtggtaggcgtttgtagttttagttattcgggaggttgaggtaggagaatggcgtgaatttgggaggtggagtttgtattgagtcgagatcgcgttattgtagtttagtttgggcgaaagagtaagatttcgttttagaaaaaaaaaaaagattattgttgttattattattttgtgtttaattttttttagttattgggttgtagggttaggtttgtggtagggttttaatagggtttaagggttgatgagaggaaatagtaatatagttttatgtttttagtttttgtttttttttaggtgggttcgagttcgattatttttaagtattttttgagtttttaattttaatttttttttttttgggtgattttggttttagat

SEQ ID NO: 5 - DNA, 9884 bp, Artificial Sequence
  chemically treated genomic DNA (Homo sapiens)
tcgtttaggttggagtgtagagtgatatgattttggtttattgcgatttttaattttcgtttttaggtttaagtaatttttttgttttattttttttagtagttgggattataggtttgtgttagtatgtagggataatttttttatttttagtagaacggggggttttattacgttgattaggttggttttaaatttttgattttaagtgatttgtttgtttcggttttttaaagagttaggattataggtgtgagttaatatatttagtttaaaatgattttttttttaaaggaaatttattagtaagttaagtttatttattatttattttattttatttttagagatagggttttgttttttcgtttaagttggagtatagtggtgattatagtttattgtaattttgaatttttgggtttaagtaattttttcgttttagtttttttagtagttgggattataggcgtgtattattatatttagttaattttttgtattttttgtagaaagagggttttattatgttgtttaggttgtttttgaatttttggttttaagtgatgtttttatttgggttttttaaagtgttgggattataagtatgaggtattatatttagtttgttttgtttattttttttgttttaaatatatttttgttttggttggatgcggtgttttatatttatatttttagtattttgggaggtcgaggtaggtggattatttgaggttcggagtttaagattagtttgattaatatggtaaaattttatttttattaaaaatataaaaattagttaggtatggtggtacgtgtttgtaattttagttatttgggaggttgaggtaagagaattatttgaattttggaggtagagtttgtagtgagttgagattgagatattgttttttagtttgggcgatagattgagaatttattataaaaaataaaaaaaaataaaaattaaatatatttttgttttgtaattaaattttagataaattggtgtagttttttagtatggggtaaaaaaagttatttttatgttttttgtttatttttattattataaattttataaaatatttttgtaatttttttttttttttgagaggagttttgtgttgttgtttaggttggagtgtagttgagtaatttcggtttattgtaagtttcgtttttcgggtttacgttatttttttgttttagtttttcgagtagttgggattatacggggttcgttattatattcggttaattttttgtatttttagtagagatagtgttttattatgttagttaggatggtttcgattttttgatttcgtgattcgtttattttagttttttaacgtgttgggattataggtatgagttattatgttcggttttttttttttttttagatagaattttattgtgttgtttaagttggagtgtagtggttattgtaatttttattttttaggtttaagtgattttcgtgttttagttttttaaatagttgggattataggtatgtgttattatgtttagttaaagatggggtagggggtgtagggatttcgatatgttggttagatttattttgaatttttgattttaagtgattaatttgttttagttttttaaagtgttgggattataggtgtgagttattatgtcggttaattttgttgttattgttgttgttgttttgagatagttttatttttgtcgcgtatattgaagtgtagaggcgtaattttggtttattgtaatttttatttggtttattgtaatttttattttttggatttaagcgattttttttttttagttttttgagtagttggggttataggtgtgtattattatttttagttaatttttgattttttagtagagacggggttttgttatgttggttaggttggttttgaatttttgattttaggcgatttgtttgttttggttttttaatgtgttaggattatatgcgtgagttattatgttcggttttgttgtttttagaaacgatatttttttttgttagtttgtgaaagttgattgggttatttttgttatttttaattaaaatagtgttaagaggtaaagggaaaaaaaagtatttagggtatataatattgttttaaaaatgtaattatttgtaagtttggttgttgaaattgttcgttataatttaaattagtttttttgtttgtttgttttgagatggagttttattttgtcgtttaggttggaatgtaatggtatgattttggtttattgtaatttttgtttttaggtttatgtgatttttttgttttagttttttaagtagttgggattataggtattcgttaatatatttagttaatttttgtatttttagtagagacggggttttattatgttggttaggttggttttgaatttttgattttaggtgatttattcgtttcggttttttaaagcgttgggattataggcgtgagttatcgtgttcggttgatttaaattagttttatttaattagttgttaaaaataatttgtagtgattttaaggatcgttttatttagttgttattatttgttaattaaaatttgttagttttttaaaattttattagtgataatgaatttttttaaagaataatatataatagttttttttttttgttgtttgttttgatatagggttttgttttgttgtttaggttggagtgtttcggtgtgattatagtttattgtatttttaaatttttgggtttaagtgaattttttattttggttttttaacgtgttgggattataggtatgagttattgtttttggttatattttttttttataaaaataaaatttttaattatttgtttgtttttttgacgtattaaagattattttgtttgtgtgtatgttttgaatggtaattattgttttttaaatgttttaaatttatagatttgtttttgtattttattttatttggatagttttttttttttttttttttttttttttttttttttttttttttttttttttagatggagttttatttttattgtttaggttggaggatagtggtgtaatttggggtttattgtaatttttgtttttcgggttaaagtaatttttttgttttagtttttttagtagttgggattataggtgttcgtttttatgtcgggttaatttttgtatttttagtagagatggggttttgttatgttggttaagttggtttcgaatttttgattttaggtgatttattcgttttagttttttaaagtgttgggattataggcgtgagttattgcgtttggtttggatagtttttttgtatttttgatttttaggagaattgttgttttatttttttatggtttattttgaaaagagtaggatattagagaaaaggatggttaattacgtgtttataagttatgttttaggagatgatttttgtagttcggatatttatttgttttattaaaatttaggttttaggtgtaagttaggatttgggggatggaattgaaaatgtttttttaaacggtgaaaagcgggtttagcgtagaggttgaggaggaaggattatttgaagttaggagttcgagattagtttgggtaatatagagagatttttttttacgttttgtttattatcgtcgtttttataaaaaaattagttaggtatggtggtgggattataggggtataggttgaggttagaggattgttttagtttaggagttttaggttgtaatgaatggtgataaatttattgtatttttttttgggtaatagagtgagattttgttttaaataaaataaaataaataaataaaaaaaaaagaaaagtgaaggtaacgttaataagtgtttattatgatataataatattagtattatatatatatattaattttgtatatattattaaaattttagtatggtaattttgtggagaaaaaaaaaaagtttatttaggtaagtatagaaagtgtttttttattatttttttttgattttaaatgaagaagtagagtttttaatagtatgaattagatgttggtagaggaaaaagcgagttttcgttttattttggtgtaaatttttgattttggataatttttagtaggattggtaatgatttttttaggtttttttgtgattgttgatatattttttttaatttaaagtttcggaatatatgtttaggacgtgtaggtttgttatataggtaaatgtgtgttatggtggtttgttgtaattattattttattatttaggtattaagtttcgtatgtattagttatttattttgatgtttttttttttcggttattaggatttttaaatagtttgttttaatttattgataggatttttttagaatgaatttaaaaaagttgggaatttttaatttgagcgtagatcggattacgtggaacggtgttggtgtttgttaaaaatttagattgtttcgaattttcgatttagagggtttgaagtggggttaagatttgtagattaacgggtttcgtgggaggttttttgttggtggttagtttcggggtttagttgtttattgttgttattcgtgttaaattacggtttaatattatcgatattattaatcgttttggtttttaagatagtcgcgattttagacgggtgaggtttttattttttagtattagatggggtttgggaattgttgtttagtagatttagttatttacgtggttattcggggtaattataaggtcgatttaaaagattaaaataaatgtataacgaatgttaggattaaagtcggaatatatttaattatttattttgaggtttaaatttaaaaatgttatataaaaaaataagtaatttgttaaaaaatgtagagtggcggcgggggcggggggagaggtggtgaacgcgaggggtagtattttcgggttaggtgggtcggttgttttgattttttttgcggttcggttattttgttttagttagttcggaggttgcggttgtagaagtatcgtttgcggagtaattgtaaagatgttgttcgtgcgcgttgttgcggtcgtggttcgcgttttttttcggcgggtcggattggtgagtatcgaaggtcggtatgatgtaggcggtcgggtggggttgtagggtggtggtgcgtcggttcgggcgttttttgtaggagggcgaggggttgtggcgaatgtcgttattttgtattcgtggttttttcggttggatagagtaggcgatataggtgtttttttgttcgttatttgcgtagaggtagaatggtatagggtagatagttaattcgatggtgtttagagatagggttttaagatttttgttttcggttgatagcggttttagaagggggattttgggtgaaggttagggtttgggcgttagtttttcgaggtttgttttgaatcggtgaggtttttttttttcgatttttagggtcgcgtttcgttgaaggttagaaaattgttgttagtttttgttgaagttagttagtggagtttgatattgtgtgaaggttagtaggtttagtattttatttttgtttggagtttagtttagaggaaaggaataaatgaaggtggtttttggaatatttacgtaggtttttttttagtgttgaatacgaaacgatcgtgaaaacgttttgtaggtgtaaagaattattttatgtggttagtattgtgataatagtgaagttggtttttaaattgttttttcggtagagtgtgtgttttgtggtatttggacgtgtttaaagaatttgtttttgagttttttatttggttttgagtaatttttagtgatggagaatttaagtaaaagagaataaggttggaaaatggttgtaaggattaatatttttcgttatttgttttttttgaaattaatatgattttagtgtaaacgtattgatattgatattttttttttgttttaaaagtaattttaatttgaaaggtgaaataaatatgttggttgttttgttgttttaataatcgttggtagtattttgggtttttgttaataaaaaagtatttttaacggtttttatttagtttttatggaaggtagaggttttagaattgatagtgattagtcgtagtattataatttgaaggagaaattgaaggaagttttaggtggttgtaggatttgttgagagagtaaaataagtttatatgttttaatttttggtttttaatttaattttagtatttatttagtttttgtttgtttggtttttttttttttttttttttttgagatggtgtttcgtttagtcgtttaggttggattgtaatggcgtgattttcgtttattgtaattatcgttttttaggattaagtgatttttttattttagtttttcgagtagttgggattataggtattcgtcgttatgttttgttattttttgtagtttttcgtagagacggggttttattatgttggttaggttggttttgaatttttgacgttaggtgattcgttcgtttcggttttttgaagtgttgggattataagtatgagtcgtcgtgttcggtcgtttgttgtcgttgttgttgttgttgtttttaagtaaaattggaattattttgagttttgttttttgtaggaagttgtttattttagaatttttgtaattttattaaaatatatttaaagttaaaataataaaaattgggtattttaaagggaaagatatttatattttgttaatagtggggggggggggttttcggggttttaggttttttttttttttttttttcggggttttaaaaaggaatttttttttaaaaaaaaaaaaaaaaaaaaaaaaagaaagaaaaagaaagaagaaaaaaagaaaagaaaaaagaaattagagtagttggtgaaagtttatttattttttgtataaataggatttagtttggttgtaagtaatagaaaattttaaaataatagtggtttagataaggaagaggtttattttttttttatttataagtttttgattggttattttagggttggtatggttgtttttggggtgaggatttatatttttgtttgtttattttagtggtgtttggtttaatgtttggtatatgatagatttttagtaatatttattgaatgattgaaaaaattattaattaatagaaggatattgaaaaatttttgatatgtagaattaggatgattttttaaagagtgggtttatttttagtgtttttaatagtatgtgcggatgttagttttattttgttagttatagttattgtttttttttttgtttatttaataagtaaaatttggtgttttatttaatttttatttgcgtttttattattagggagagtgtatatttggttatttttttgtaattttttttttataaatggttttgtttttttttttatgttttgtttgtaaatttatatgtatattttaaaatatatatttttgtatatatatacgtgtgtgtgtgtgtgtgtgtgtgtgtaatttatatgttttaatatttagtataggtatgatatagtgagaggtagtttttaggtttttaagtttttgtattggatattttcgggtttgatttttagtttggttttttttaagttaaagaatgtgtgtgttcgtgtttaaattatttagttttttttagttttgtttttttatttgtaaaatgatatatgtatatggattttgaaaatattttatatagttaagtttattgatttaaagttttgtgattttttttattatatttcgaggttttttgtggtttaagttttatttaatatgtgttttatgattgggcgttgtggtttatgtttataattttagtattttgggaggtcgaggtgggataattgtttgagtttaggggtttaagattagtttgggtaatatattgagattttgtttttataaaaaaaattttaaaattagtaaggtatggtggttagtatttgtagttttagataattaggaggttgaggtagaaggattatttgagtttatgcggttgaagttgtagcgagtcgtgattatattattgtattgtaatttggatgatagagtaagacgttgttttattaaaaatattgttttttgagtatgagggtttaagtgttttgatatttgtagaagttagagatttgtgtggatttgtaaaatgaggaggaggtggatttttgtttttagggttttatattttttttaaggaagtaaataaagatgtaggatattaatgggaaatagattgatttatttttttttaggttaaaaagagtggtttatttgtcgggatggtggtttttgtttgtaattttagtattttgggaggttaaggtaggtggattacgaggttaggagattgagatttttttggttaatacggtgaaaatttcgtttttattataaagtagaaaaaaattagttcggtgtggtggtatgtgtttgtagttttagttatttaggaggagaattgtttgaatttgggaggtagaggttgtagtgagtcgagattgtattattgtattttagtttgggtgatagagcgagatttcgttttttaaaaaaaaaaaagtggtttattggggtaagtttttttttttttttttttttttttttttttttagtagagatggggttttattatgttggttaggttggtttttaatttttgattttatatgatttattcgttttggttttttaaagtgttgggattataggtatgagttatcgtgttttgttaatagttgttttttaaaatattgattgttaggtcgggtgtagtggttgacgtttgtaattttagtattttgggaggttaaggtgggtgtattatttgaagttaggagttcgagattaatttggttaatatggcgaaattttgtttttattaaaaataaaaaaattagtcgggtatggtggtggtcgtttgtagttttagttatttaggaggtcgaggtatgagaatcgtttgaatttgggaggtgaaggttgtaatgagttaagatcgtgtttttgtattttagtttgggtgatagaatgagatttcgttttagaaggaaaaaaaaaatgtgtgtgtatatatatatttattgtttagtaaatatatatttatttattgtttagtttgggtaatatgatgaaattttgtttttataaaaaaaataagtataaaaattagtttggttaggtggcgtatttttgtgattttatttattggggaggttgaggtgggaggattatttgagtttaggaagtcgaggttgtagtgagtcgtgattgagttattgtatttcgatttgggtgataagagtgagattttgttttaaaaaagaaaaaaaaataagtcgggtgcggtgtttacgtttatagttttagtattttgggaggttaaggcgggtggattatttgaggttaggagttcgagattagtttggttagtatggtgaaatttcgtttttattaaaaatataaaaaattaatttggtggaggtggcgtatttttgtagttttagttattcgggaggttgagaatcgtttgagattaggaggtggaggatgtagtgagtcgttttaaaaaaataataataataaagtatagattgtattttaaaaatatgcgagtgtttattgtgtattaggagttgtataaaaggtttttatatatattaaaagttatttttttatttgatattttaaataaaatgttttatatgtaattagtatttttattagtattttgattatattaagttggtatttgtttaagtttgtaagttttataaaggttttgttaaaaattaaatttttaagaatatttttgtattagg

SEQ ID NO: 6 - DNA, 9884 bp, Artificial Sequence
  chemically treated genomic DNA (Homo sapiens)
tttagtgtaaaagtatttttaaaaatttgatttttaataaagtttttataaaatttataagtttaaataaatgttagtttagtgtgattaaagtattggtgaaaatgttaattatatataaagtattttgtttaaaatgttaaatgggaaagtagtttttgatatatgtgaaaattttttatatagtttttagtatatagtaaatattcgtatatttttaaaatgtagtttgtattttattattattgtttttttgagacggtttattgtattttttattttttagttttaagcgatttttagtttttcgagtagttgggattataggggtgcgttatttttattaggttaattttttatatttttagtagagacggggttttattatgttggttaggttggtttcgaatttttgattttaagtgatttattcgttttggttttttaaagtgttagaattataggcgtgagtatcgtattcggtttattttttttttttttttgggatagggttttatttttgttatttaggtcggagtgtagtggtttaattacggtttattatagtttcgattttttgggtttaggtgatttttttattttagtttttttagtaggtgggattataggagtgcgttatttggttaggttaatttttgtatttattttttttatagagataggattttattatattgtttagattgggtagtaaataaatatatatttattgggtagtaaatatatatatatatatatattttttttttttttttgagacggagttttattttgttatttaagttggagtgtaggggtacgattttggtttattgtaatttttattttttaggtttaagcgatttttatgtttcggttttttgagtagttgggattataggcgattattattatgttcggttaatttttttatttttagtagagatagggtttcgttatgttggttaggttgatttcgaatttttgattttaggtgatgtatttattttggttttttaaagtgttggaattatagacgttagttattgtattcggtttggtagttagtattttaaaaagtaattattggtagggtacggtggtttatgtttgtaattttagtattttgggaggttaaggcgggtggattatgtgaggttaggagttggagattagtttggttaatatggtgaaattttatttttattaaaaagaaaaagaaaaagaaaaagaaaaagaaatttgttttagtaaattatttttttttttttgggaaacggagtttcgttttgttatttaggttggagtgtagtggtgtagtttcggtttattgtaatttttgttttttaggtttaagtaattttttttttgagtagttgggattataggtatatgttattatatcgggttaatttttttttattttatagtagagacggggtttttatcgtgttagttaggaaggttttaattttttgatttcgtgatttatttgttttggttttttaaagtgttgggattataggtaggagttattatttcggtaggtaaattattttttttagtttgaaggagagtaggttagtttgttttttattagtgttttatatttttgtttgtttttttaagaagaatgtaggattttgagggtaggaatttattttttttttattttgtaggtttatataggtttttgatttttgtaaatgttagaatatttaagtttttatatttaaaagatagtatttttagtgagatagcgttttgttttgttatttaggttgtagtgtagtggtgtaattacggttcgttgtagttttaatcgtatggatttaagtgatttttttgttttagttttttgattatttgggattgtaggtattggttattatgttttgttaattttaaaattttttttgtagagatagggttttaatatgttgtttaggttggttttgaatttttggatttaagtaattgttttatttcggttttttaaagtattaggattataggtatgagttatagcgtttaattataagatatatattgagtaaaatttggattatagaaaatttcgaagtgtaatagaagaaattataaaattttagattaataaatttgattgtataaagtgtttttaaaatttatatatatatattattttatagatgaggaggtaaagttgaggaaagttgaataatttgaatacgggtatatatattttttggtttgaaaggagttaaattgggaattaaattcgggaatgtttagtgtaaaagtttgagggtttgaggattgttttttattgtgttatgtttatattggatgttagaatatgtgaattatatatatatatatatatatatatacgtgtatatatataaaaatatatattttaaaatatgtatataaatttataagtaaagtatgaggaagaaaataaaattatttgtaaaagaggaattataagaaaataattaaatgtgtattttttttggtgataaaaacgtaaatgaaagttgaataaggtattaagttttgtttattgaatgagtagaaaaaaagataatagttatgattgatagagtgaaattagtattcgtatatattattgggaatattgagaataggtttattttttaggaaattattttggttttatatattaaaagttttttaatgtttttttgttagttaatggtttttttagttatttagtaggtattattgagaatttgttatgtgttaggtattgaattaggtattattggagtaagtagataggagtgtgggtttttattttaagggtagttatgttagttttggaatgattaattaggggtttgtagatgagagagaaataaattttttttttgtttaggttattgttgttttggggttttttattatttgtagttaaattgaattttatttatatagaaggtaagtgagtttttattagttgttttggttttttttttttttttttttttttttttttttttttttttttttttttttttttttttttttttttgaaaaaaaatttttttttggggtttcggggggggggggggggggggatttggggtttcgggaattttttttttttattgttaataaaatgtaagtgtttttttttttaaggtatttaatttttattattttgattttagatgtattttaatggagttgtaggaattttaagataaatagttttttataaggggtaaaatttaaagtagttttaattttatttaaaaataataataataataacgataataagcggtcgggtacgacggtttatgtttgtaattttagtattttagaaggtcgaggcgagcggattatttgacgttaggagtttaagattagtttagttaatatggtgaaatttcgtttttacgaaaaattataaaaagtagtagggtatgacggcgggtgtttgtaattttagttattcgggaggttgaggtgggagaattatttgattttgggaggcggtggttgtagtgggcggagattacgttattgtaatttagtttgggcgattgagcgagatattattttaaaaaaaaaaaaaaaaaaaaaaattaggtaaataaaaattgaataaatgttagagttagattagaaattaagagttggggtatgtggatttattttatttttttaataaattttgtagttatttggaattttttttagttttttttttaagttgtaatattgcgattggttattgttaattttgaagtttttattttttataggagttagatgaaaatcgttaaaaatgtttttttgttaatagaaatttaagatgttattagcggttgttaaggtagtaaaatagttaatatgtttattttattttttaaattgagattatttttagaataaaaaaaaagtgttagtgttaatgcgtttatattgaaattatgttaattttaagggaaataaataacgaagggtattaatttttatagttattttttaattttgtttttttttatttgaattttttattattaaaaattatttaaaattaggtggaaaatttaaggataaattttttaaatacgtttaagtgttataaagtatatattttgtcggagagataatttagaaattagttttattgttgttatagtgttggttatatgaaatggttttttgtatttgtaggacgtttttacggtcgtttcgtatttagtattaagagaaagtttacgtaagtattttaaaaattatttttatttattttttttttttaaattgagttttaggtagaggtgaaatgttgggtttgttgatttttatataatgttagattttattgattagttttaataagagttgatagtagttttttgatttttagcgggacgcgattttaagaatcgaaagagaggaattttatcgatttagaataggtttcggagagttagcgtttaagttttgatttttatttaagattttttttttagggtcgttgttagtcgaagataggaattttgaggttttgtttttggatattatcgagttaattgtttgttttgtattattttgtttttgcgtaggtgacgagtaaaagggtatttgtgtcgtttgttttgtttagtcggagaagttacgggtgtaagatggcggtattcgttatagtttttcgtttttttgtagagagcgttcgagtcggcgtattattattttgtagttttattcggtcgtttgtattatgtcggttttcggtgtttattagttcggttcgtcgaggaagggcgcggattacggtcgtagtaacgcgtacggatagtatttttgtagttatttcgtaggcggtatttttgtagtcgtagttttcggattgattgggataaaatggtcgagtcgtaaagaaggttaagatagtcggtttatttgattcggaagtattgtttttcgcgtttattattttttttttcgttttcgtcgttattttgtattttttggtaggttatttatttttttatgtaatatttttaagtttaaattttaaaatgaatgattagatatatttcggttttggttttggtattcgttatatatttattttggttttttgagtcgattttgtggttgtttcgggtgattacgtgggtagttgaatttgttaagtagtagtttttaggttttatttggtgttagaggatgagggttttattcgtttggggtcgcggttgttttgaggattagggcgattaatagtgtcggtagtgttagatcgtggtttagtacgagtagtaatagtgaatagttaaatttcgggattggttattagtagggagttttttacggagttcgttaatttgtagattttagttttattttagattttttgagtcgaaaattcggggtaatttgaatttttaataaatattagtatcgttttacgtgattcgatttgcgtttaggttaaagatttttagtttttttagatttattttaaaagaattttgttagtgaattagagtaaattgtttaaaaattttgataatcgggggaggggagtattaagataaatagttaatatatgcggagtttaatatttaggtgatgggatgatagttatagtaaattattatggtatatatttatttgtgtaataaatttgtacgttttggatatgtatttcggaattttaaattaaaaaaaatatattaataattataaggaggtttagaagagttattgttaattttattgagaattgtttagaattagaagtttatattaggataggacgaggattcgtttttttttttgttaatatttagtttatgttattgggaattttgtttttttatttggagttaaagggagatgatgaaaaaatattttttatgtttatttggatgggttttttttttttttttatagaattattatattgagattttggtgatatatgtaagattggtgtgtgtgtgtgatgttggtattattatgttatagtggatatttattaacgttgtttttattttttttttttttttatttatttattttattttatttaagatagggttttattttgttgtttaggaaagagtgtagtgggtttattattatttattgtagtttggaatttttgggttggagtaattttttgattttagtttgtgtttttgtggttttattattatgtttggttaatttttttgtaaagacggcggtggtgggtagggcgtggggggaggtttttttatgttgtttaggttggtttcgaatttttggttttaagtgattttttttttttagtttttgcgttgggttcgttttttatcgtttggagaagtatttttagttttattttttaaattttggtttatatttagaatttgaattttggtgaggtaaataaatattcgggttataagggttattttttgaaatatggtttgtaaatacgtgattagttatttttttttttagtattttattttttttaaggtaagttatgggaaaatagagtagtagtttttttgggaattaggggtataaaaaggttgtttaagttaggcgtagtggtttacgtttgtaattttagtattttgggaggttgaggcgggtggattatttgaggttaggagttcgagattagtttggttaatatggtaaaattttatttttattaaaaatataaaaattagttcggtatgggggcgggtatttgtaattttagttattggggaggttgaggtaggagaattgttttaattcgggaggtagaagttgtagtgagttttagattgtattattgttttttagtttgggtaataaaagtgaaattttatttaaaaaaaaaaaaaaaaaaaaagaaagaaaaaaagaaaagaaaaagaaaaaggttgtttaagtaaaataaaatatagagataaatttataaatttaaaatatttgggaagtaataattgttatttagggtatatatataaatagggtggtttttggtacgttagaagaataaatagatggttagaggttttatttttgtaaaagagaaatatagttaggaatagtggtttatgtttgtaattttaatacgttgggaagttaagatgagaggtttatttgagtttaggagtttgggagtgtagtgagttgtgattatatcggaatattttagtttgggtaataaagtaagattttatattaaaataaataataaaaaaagagaattgttgtatattgttttttaagaaagtttattgttattagtaaggttttggggagttggtaagttttgattggtaagtaatggtaattaggtaaaacgatttttagagttattgtaggttgtttttagtagttaattagataaaattggtttaggttagtcgggtacggtggtttacgtttgtaattttagcgttttgggaggtcgaggcgggtggattatttgaggttaggagtttaagattagtttgattaatatgatgaaatttcgtttttgttaaaaatataaaaattggttgggtatgttggcgggtgtttgtaattttagttatttgggaggttgaggtaggagaattatatgaatttggaggtagaggttgtagtgagttaaaattatgttattgtattttagtttgggcgatagagtgagattttattttaaaataaataaataaaaaaattggtttaggttatagcgggtagttttagtagttaggtttatagataattatatttttggagtaatgttatgtgttttgagtgtttttttttttttttattttttgatattgttttagttggggatgataagaatgatttaattaatttttataagttaataggaaaaaatatcgtttttaaaaataataaggtcgggtatggtggtttacgtatgtaattttagtatattgggaggttaaggtaggtagatcgtttgaggttaggagtttaagattagtttggttaatatggtaaaatttcgtttttattaaaaaattaaaaattagttgggggtggtggtgtatatttgtaattttagttatttaggaggttgaggaaggagaatcgtttgaatttaggaggtgaaggttgtagtgagttaggtggaggttgtagtgagttaagattgcgtttttgtattttagtatgcgcgataggagtgagattattttaaaataataataataataataataaaattagtcggtatggtggtttatatttgtaattttagtattttgggaggttgaagtaggttgattatttgaagttaggagtttaagatgagtttggttaatatatcgagatttttgtattttttgttttatttttagttgggtatggtggtatatgtttgtaattttagttatttaggaggttgaggtacgagaattatttaaatttgggagatggaggttgtagtgattattgtattttagtttgggtaatatagtgagattttgtttgaaaaaaaaaaaaaggtcgggtatggtggtttatgtttgtaattttagtacgttgggaggttgaggtgggcggattacgaggttaggagatcgagattattttggttaatatggtgaaatattgtttttattaaaagtataaaaaattagtcgggtgtggtggcgggtttcgtgtagttttagttattcgggaggttgaggtaggagaatggcgtgaattcgggaggcggagtttgtagtaagtcgagattgtttaattgtattttagtttaggtaatagtataagattttttttaaaaaaaaaaaaaaattgtagggatattttgtaaaatttgtagtgataaaagtggataaaagatataaagataattttttttgttttatattgaagggttgtattagtttatttgaaatttggttatagagtagagatatatttagtttttgtttttttttgttttttgtggtggatttttaatttgtcgtttaggttggagagtagtgttttaattttagtttattgtaaattttgtttttagggtttaagtgatttttttgttttagttttttaagtggttgggattataggtacgtgttattatgtttggttaatttttgtatttttagtagagatggggttttgttatgttggttaggttggttttgaatttcggattttaggtgatttatttgtttcggttttttaaagtgttgagaatataggtgtgaggtatcgtatttagttagagtagagatatgtttgaagtaaaaagaataagtaagataggttgggtgtggtgttttatgtttgtaattttagtattttgagaggtttaagtgggagtattatttggggttaggagtttaaaaatagtttgggtaatatagtgagattttttttttataaaaaatataaaaagttagttgggtgtggtggtgtacgtttatagttttagttattaaggaggttgaagcgggaggattgtttgagtttaggagtttaaggttgtagtgaattgtgattattattatattttagtttggacgaaagagtaagattttgtttttaaaaataaaataaaataaataataaataagtttggtttgttagtaagttttttttgaaaagaaaattattttaggttgggtgtgttggtttatatttgtaattttagttttttgagaggtcgaggtaggtagattatttgaggttaggagtttgagattagtttgattaacgtggtgaaatttttcgttttattaaaaataaaaaaattatttttgtatgttagtataagtttgtaattttagttattagagaggatgagataggagaattgtttgagtttggggacgggggttggaggtcgtagtgagttaagattatgttattttgtattttagtttaagcga

SEQ ID NO: 7 - DNA, 5525 bp, Artificial Sequence
  chemically treated genomic DNA (Homo sapiens)
atttttttttatggtaattgggattagattgttttatttttcgatatttttgtaagatttttttatgaatattttgatatttttttgagtttggagaaaggcgttttttttgtgtatttagtttgataaattttttagttatagtttttattttggtatgtaaagttttgtatttattatattttgtattgacgttatttttataatttcggcgttgtttataggagatgatagtaatatattttattaaataatttgggagtttaattgttgaaggttttatggaggtagtgtaattttttttagtttttttattggaatttggattggagttatttagtttggtaattttttttttttttttaagatttttttttttttttttaatagttttaatgtcgtgtttttttatttggtttttttttttatgttttttagatttttttttggattttttgtgagatattgaatggtttttttttataggttttggatattttaatagaattgaattagggggtaaggtttttagagaagttttagaggtatatttgttttgttggtttttatagatattattgttttgattaaaattgttaataggtaggttttgagttttcggttttttggagtgttaggggaattggagttagaatttataatttgaggaggatgtgaaatcggtagatgggttgaaggtaagcggtggaggggtggggatggtagtagttgtagggggtagagggaggtttgtagtagattttttattggtgggatttaaatgattatttagtgttggtggtattttgttcgttaggtgagatattcgggtttttttatttattaaatgattaataaattttgaatttaaaagtcgtgtttgaggagaagatatagcgtttttattagaatatattggagattttgaacggttggtgtttgtagtattttgagatggatttagttttttagagagtattgattttaatgattaagtgtttattttattgtatttaggttagtttttttgaagttttttaaaaatataattttttgaagtatacgagaggtttttaggatttagattggttatttgttgtagaattgtttttagggagtttttgtttttttgattgatattatttttttggagtttagtaagtagtttcggttttttgtaggtttttagggttagtaagtgaattattttgtttttgtatggtttttgagagacgttgttgttgttgtgtgtttatcgaattggatttgtagggtttatgggggttgattttttttttttaggaattgtatttgaaatagtttgaggtgtttttcgaatttgtatttttttttttatatatggtttatcgggtttgataatttttgtgtttcggttgcgggattttttttttgtttgggtcgttttttttcgtgttatttgattcgagtcgtttgttgtatatattgtaattttattttgtataaattttaggtaattgagttgggaggttttagagttggagaatgtttgttggacgtagttaaagttgttttgagggttgtttttgtttatatttgataaataaaagttaaagttatgaattttattgaggggattatttttgggaattttgataagtttttggagtttttggaattgaattgaaggtcgaaaagaaattaaatttttgtggttttggtaagtttggagcgtttggatcgtcgattcggtgagttttatatgtagtacggtgatgttgttttgttttagtcgttcgtattagagtttatagcgttgtttcgcgatttttttattttcgatattttaaatttttagaggtgtcgtcgtcgttagtttagttttagtttttattgcggtcgtagttatttgggtttttgtagtcgtcgttattgttagggttatttcgttgttggcgtattgttatatattgcgcggagttagatttcggattgttatcgtcgttatttgttttattttttggtttcgcgtttcgttttaggttagttttattggtttagtttttttagaatcgtttttatcggtcgttttttatttttacgggggcggggtttaaagtcgttggagttttgtttttgggattggacgttcgagaggtaagagagttattataaggttttttaatttttatgttttttttagtggatttttaggttattgtggtttgtattattaggttatttataaaaatgaatatttttttaaattaggttattttatagtaaattacggtttttgattattattatgttttgaataaagattatgagtaattgtatttgaatgttgttgaattttattgattgaattttgaattgtttgattttgattaggttggtttgtggaaagtgttattaagaagagttttttagttcgttggtattatttttttgatagttattataaaagtttttttgatgtatttttttaagaattttaaatttttatatgtagttattttttgtatattaaatggtttttttatggttaggataataaaaatatgaagaaagtatataagattttaattaatttgacgttgtgaattgtgaattttgaattgaaattaagtaagttttttatgattaggttttaaggttttggttagttttttaaaattgagaggttgaaattttttgattaaaattaatatatttgttttttttttttagtttttggaaattattattttaattttgtttttataaaatagtaaattattttagagtttatatataagtgagattatgtagtatttatcgtgggtttattttaaggttttgagtaaattattatttttttgtgttagggtattttgagttagttttgttataaattattttgtttaggtaatatattgtaaaacgttttataatttaatggttttttttttagaaaaaaagtagtgaaagttttaatagttaaaaagtgtttaatttaattgatttttgggaaaaaatattcgtataattttagatagttttaatttttgaaggtaatatagtttggtttttgttgataaataaataaaaataaaaaaattatatatatatatatataaattagttttttgtttttaagtgtgtaagaatgttagtatttaaaatttttaagatatataaaaattaaatagaattgtttaagtttttaaagggagtttggaaatttgaagaaagtaaagttaaaaatattgttttatgagttatataattatttttttttttattttttatagttttttttttatttattatttaggtaattttgtatttaaatttaataatttaatattttatttgttataagaatacgttattatgttattttaagtttttttgggtaaattatatataattagataggttgggttagggttgtttataagattttagtttagagtgtggtgtagtagtttattttttttaggatttttgttgtaataggatatgggagaagggaaatattaacgttagtagaatgggaggaattagattatggagatatgatttttgttttttggtatttttttagttgatttagaagaggatatagagggagatagatatatggttatttttataattataaattttgttatatgttgagaggatggttttttaaagttagttagtgtataagtagtggaggttgggattgttttattttttttgtttagggttatatagtttggtagatttggaaagatttttttgagaaagtgattttggaattgatattttagtggaaataattaggtattgggagggggtgaggtgaggagaaggttaagaatttttatgtagagggaattttgtgtagagattttagttaggaagaggttttgtatagtggaggaattgaaagttaatagttaggttatagtatagagtaaatgatgttggggtgtgaggtgatgttaaaaggtagatattagggttagagggcgtataattttgtaggtcgtgttaatgattttgttttttatttaagaatgttattttaggagattagttaaaaggttagggtgatggtgacggtggaaatatagaaaaaggaatttatttaagaggtatttaaaaagaagtgaaatagagatgagttggagatagattggataaaaagagtgagggagagggaggtgttaggttgtagtttaggttttgagttgttaaagaggagtttttttttttaggtgagttaaggtttagaattacgatttttggttatttttttttatttttagtgtgagaagtggcgagttggttgtttaggtatatattgttattttatatttattgtttaagatagaggcgtatatttggaaagtgaatgagttaggagttagaggagaaggtatgtcggtagaggttagggcggagaggaggaagagagtttgggggcgcgtttttaaaaaggagttagggaagatagagtagaggtcggggaggggagagtaaggattatgataggaggaaagagaggttagggaatattgaggtggaggaattttgggatatgatagttgtaaagaattgtagttaatttaatttagtttttttaatgtgtaattgaggaaattaatttttatgcgtttattttattgtaaatgtggtatttgtatttgagaaattttggaaaatataaagatgtaaagtaaattaagattatttatagtttttttatttagagatatgtattgttaaagtaaggattttgatttttttttttttttgtatttttattatggttggaattgtaatatagacgtaattttatgttttgtttttaaaatataaataatggttgtaaagcgttttatacgttgatttaaagttttttttgaaataggaaattgagatacgtcggttgtgaaatttattgaagtgagcggcggcgttaggatttttgggatttcgatttttttgtagttcgtatagttaagggcgagggcgtttttcggtagaagtagtaaatcgtcggtaagtttagcgaggagggttgtcggggtttgggtttgggaattggttggtatttagcggaaagggacgtgagttgagcggcgggggagaagagtgcgtaggttagaaggcggcgcgtagcggcgtttcgcgaggtttttacgtcgggcgatatggggtgtttgttgtttttgttgttttgggcgtttttttaggtttggggaagcgttgaaggtgggtggaacgagggcgtttgagtgtattcgcgggagggcggagagagggagttgggtagggacggggagggtaacgtttgatggggattggtgagattcgggacgtattggcgcgatttaggtagaaaattcgttgttttttggtttcggggagaggtagcgcggtatagagttcgttggtattagtcgttttttgaagtttatttttttttgttttttttttttttttttttatgttggttgttttttcggttatttgttacgcgtttttaatttttatttttttttagt

SEQ ID NO: 8 - DNA, 5525 bp, Artificial Sequence
  chemically treated genomic DNA (Homo sapiens)
attgggagagaatgaagattggaggcgcgtagtaagtggtcgggagagtagttagtataaagagaaggaagaaagaaataagaggagatgagttttaggaggcggttgatgttagcgaattttgtgtcgcgttgttttttttcggagttagggagtagcgagttttttatttagatcgcgttagtgcgtttcgggttttattagtttttattaggcgttgtttttttcgtttttatttagtttttttttttcgttttttcgcgagtgtatttaagcgttttcgttttatttatttttagcgtttttttaagtttggaggagcgtttagagtagtagaaatagtaggtattttatatcgttcggcgtggggatttcgcggagcgtcgttgcgcgtcgttttttgatttgcgtatttttttttttcgtcgtttagtttacgttttttttcgttgggtgttagttaatttttaagtttagatttcggtagtttttttcgttgggtttgtcggcggtttgttgtttttgtcgaagggcgttttcgtttttagttgtgcgagttgtaaagaggtcggggttttaggaattttggcgtcgtcgtttattttagtaggttttataatcggcgtgttttaattttttgttttaaaggagattttgggttaacgtgtgggacgttttataattattatttatgttttggaagtaggatataaggttgcgtttgtgttataattttaattatggtaaaaatgtaaagggaaaaaaggattaaagtttttgttttagtagtatatgtttttaggtggaaagattatgagtgattttaatttgttttatatttttatgttttttaaaattttttaagtgtaagtattatatttataataaagtaaacgtatgaaaattaatttttttagttgtatattgagagaattggattaggttggttataattttttataattgttatattttaggatttttttattttagtgttttttagtttttttttttttttgttatggtttttgttttttttttttcggtttttgttttgttttttttgatttttttttggggacgcgtttttagattttttttttttttttcgttttagtttttgtcggtatatttttttttttggtttttgatttatttattttttaaatatgcgtttttgttttaaataataagtgtaagatgatagtgtgtatttggatagttaattcgttattttttatattgaaaataagaaaaagtgattaaaaatcgtggttttaagttttagtttatttggaggaaaagatttttttttggtaatttagaatttgggttgtagtttgatattttttttttttttattttttttatttaatttatttttaatttatttttattttatttttttttgaatattttttgaataaatttttttttttatatttttatcgttattattattttaattttttgattgattttttgaagtagtatttttgggtagaaaataaaattattagtacggtttgtaagattatgcgttttttagttttggtgtttattttttgatattattttatattttagtattatttgttttgtattgtagtttggttgttagtttttagtttttttattatgtaaaatttttttttgattaaggtttttgtataaagttttttttatatgaaagtttttgattttttttttattttatttttttttaatgtttagttatttttattaaggtattagttttaaggttatttttttagggaagtttttttagatttgttagattgtgtgattttaggtaggagaagtagggtagttttaatttttattgtttgtatattaattggttttgagaagttatttttttagtatgtagtagagtttataattatagaaatggttatatgtttgtttttttttgtgtttttttttaaattagttggagaggtgttagaaggtaaggattatgtttttataatttgattttttttattttgttaacgttaatgtttttttttttttatattttgttgtagtaagagttttagagaaaataggttattgtattatattttaggttgggattttgtagatagttttaatttagtttatttaattatgtgtaatttgtttaaaaaagtttaaaataatatagtaacgtgtttttgtaataaataaggtgttaaattattaaatttggatataaaattgtttaaataatggataggagggaaattatgagaaataaaaagaaaaataattatatgatttatggggtaatatttttaattttattttttttaaatttttaagttttttttaaaaatttgaatagttttgtttagtttttgtgtattttaaaaattttaagtgttaatatttttgtatatttaaagataagaagttggtttgtgtgtgtgtgtgtgtggtttttttgtttttgtttgtttattaatagaggttaggttatattatttttagaagttaggattatttggaattatacggatatttttttttaaaggttagttgagttagatattttttggttattggaatttttattgttttttttttgggaaaggaattattgaattatgaaacgttttgtaatatgttatttaaataaaatagtttataataagattgatttagaatattttagtatagagagatggtgatttatttagagttttaaaataagtttacggtgggtattatatgattttatttatatgtggattttaaaatagtttattattttatggaaatagagttagggtagtggtttttaggagttggagggaaggggtaaatgtgttaattttggttaaagggttttagttttttaattttgagaggttgattaaaattttggagtttgattataagggatttatttggttttagtttagaatttataatttataacgttaaattagttggaattttatatgttttttttatgtttttgttattttaattataaggagattatttaatgtataaaggatagttgtatatgagaatttaagatttttgagaggatatattagggaaatttttataatagttattaggaggataatattaacgaattaaagaattttttttaatagtattttttataagttaatttgattaaaattaaataatttaaagtttagttaataaagtttaatagtatttaagtgtaattgtttatagtttttatttagagtataatggtgattaaggatcgtagtttgttgtaaaatggtttgatttaaagaggtatttatttttgtaagtagtttgataatataaattatagtaatttggagatttattaaaagaaatataaggattagaaaattttgtgatagtttttttatttttcggacgtttagttttaggagtaaaattttagcgattttgggtttcgttttcgtgaaagtggaaggcggtcgatgaggacggttttgagggaattagattaatgagattagtttggggcggggcgcggggttagagggtggggtaggtggcggcgatggtagttcgaggtttggtttcgcgtagtatatgatagtacgttagtagcgggatggttttagtagtggcggcggttgtagaagtttaagtagttgcggtcgtagtggaggttggagttggattggcggcggcggtatttttgggagtttaagatgtcgggggtgggggggtcgcggggtagcgttatgggttttagtgcggacggttggggtaggataatattatcgtattgtatgtgaagtttatcgagtcggcgatttaggcgttttagatttattagagttataagaatttaattttttttcgatttttaatttagttttaaagattttaggagtttgttaaaatttttaaaaatgatttttttaatgaagtttataattttaatttttatttgttaaatgtgggtaaagataatttttagggtagttttgattgcgtttagtaaatattttttagttttggagttttttagtttaattgtttgggatttatataagataaaattatagtgtgtgtaataaacgattcggattagatgatacgagaaagaacgatttaggtagaggaggaatttcgtaatcgaagtatagaagttattaaattcggtggattatatgtagggaaaagagtgtaaattcggaaagtattttaagttgttttagatatagtttttgagaggaaaaggttaatttttatgaattttgtaaatttaattcgatagatatatagtagtagtagcgttttttagaagttatatagggatagggtggtttatttattggttttgaaggtttataagaaatcggagttatttgttagattttagaaagatggtgttaattaaaaagataggaattttttgggagtaattttgtaataggtagttaatttgaattttaaggatttttcgtatattttaaaggattatgtttttaaagagttttagagagattggtttggatatagtgaaatagatatttggttattggagttaatgttttttagaaaattaaatttattttagaatgttgtaggtattagtcgtttagaatttttagtatgttttagtagaaacgttgtattttttttttagatacggtttttggatttagagtttattgattatttaatggataaaaaagttcgaatattttatttgacgagtagagtattattaatattaaatggttatttgaattttattagtgaaaaatttgttgtaggtttttttttgttttttgtagttgttgttatttttatttttttatcgtttgtttttaatttatttgtcggttttatattttttttagattgtaaattttaattttaatttttttagtattttagaaggtcgggggtttaagatttatttgttgatagttttagttaaaataatagtatttatgagaattaataagataagtatatttttaggatttttttggaaattttattttttggtttagttttattaaagtgtttaaagtttatggaagaaaattatttagtgttttataaaaagtttaaaaagaagtttaaaaaatataaggaaaaggattaaataaaaaagtacgatattgagattattgaggaaaaggagaaagattttaagagagaagaggaaattgttaagttaaataattttagtttaaattttagtggaggagttaaagaggattgtattgtttttatggaatttttagtaattgaatttttagattatttgataaaatatattgttattattttttatgagtaacgtcggaattataaagatgacgttagtgtagagtatgatgagtatagagttttgtatgttaggatggagattgtagttagaagatttattaaattagatgtataaagaaagcgtttttttttaggtttaaaagagtattagaatgtttatgaagaagttttataagaatatcggaagataaagtagtttagttttaattattatgaagaaaaat

SEQ ID NO: 9 - DNA, 6621 bp, Artificial Sequence
  chemically treated genomic DNA (Homo sapiens)
tttgtatttttagtagagatggggttttttttttttttttttttttttttttgagagggagtttcgtattgttatttaggttggagtgtagtagtgttatttttatttattttaattatcgttttttaggtttaagtaatttttttgttttagttttttaagtagttgggattataggtgtttattattacgtattattaattttttgtatttttagtagagatggggttttattatgttagttaggttggttttgaatttttgattttatgatttatttatttcggttttttaaagtgttgggattataggcgtgagttattatgttcggttaagatggtgttttatcgtgttggttaggttggttttgaatttttgatttcggttttttaaagtgtcgggattataggtgtgagttattgtgttcggttaggagttttattgtgaagggaaggaatgaatatagttggaggggaaagtggtattaaggaaaggttttttattattaataataaatattttattgaaatatattatttatatagaatagttaataaattttgagtgtgtagtttaatgaatttttataaggtgaatatatttaggtaattagtatttagattaagaaatggaaagtggttaggtgtagtggtttatgtatataatgttaatattttgggagtttaagacgggaggatcgtttgagttcgagagtttgagattagtttgggtattatagttagattttcgtttttaaaattatatatatatttttttttgagatagagttttgttttgttgtttaggttggagtgtaatggtatgattttagtttattgtaattttcgttttttgggtttaagtgattttattgttttagttttttaagtagttgggattataggcgtgtgttattatattcggttaattttttgtatttttagtagagacggagttttgttatgttggttatattggtttcgaatttttgattttatgatttatttatttcggttttttaaggtgttgggattataggcgtgagttattatgtttagttaaaataaaaaataaaatttttaattagttaggtttatgggtgtatgtttgtagtttaggttatttaggaagttgaggtgggaggattatttgaatttagaagttcgaggttatagtgagttatgattatgttattgtattttaatttgggttatagagtaagattttgttttaaaaagtgaaaaataaataagaaatagaatatgattagttgttaatattttttttatggttttttgtagttattattatttttttgaaaggtaattagtattataattaattttttttttttttgagacggagtttcgttttgttatttaggttggagtgtagtggtttaatttcggtttattgtaatttttattttttgggtttaagtaatttttatgttttagtttttatagtagttgggattatagttgtgtattattatatatggttaatttttgtgtatgtatatatgtgtgtatatatatgtttgtgtatattatatgtgtgtatatatgtatattatatatgtgtgtatatatgtatatatatatatatatgtatatgtatatatatatatatatgtatatgtatatatatatatatatgtatatgtatgtatatatatatatgtatattatgtatatatatatatgtatgtatattatgtatatatatatatatatatgtgtgtgtgtgtatatatatatatatttttttttagtagagatgaggttttattatgttggttaggttggtttcgaatttttggttttaagtgattcgtttgttttagttttttaaagtgttgggattataggtgtgagttagatttaaatagtatgttttttttgtgtttttttttttatgtttgatagttgatgtgagatttatttttattgtgggtagcgtttttgttttttttattattgtataaaataattttgttttatttatttattttattgttgatgggtattagggttgttttttgtttggagttaaaatgattaatatggttatgaatatttgtgtatatgtattttggtatatttgaattgtattgtagtttttgtgttaatttttttttttttatggttttttgtggttattttttcgtttttttatatgatttttatagttgtttgtgattttattttggttatttttagtgatttttttgggtgtatttttgaattatggattcggttatttttttgtggtttttattttagttttagttttgcggttttgttttattatattaagtttttaatgttggtgttttttagatttagggttttaaaaattttttgtatatttttaatgggtattattatttttatgttaattaatattaaatttgttttttgattatattttttagttagtttattagtataaaattgagtttattaaatttttttaagaagtatgtttttaattgttgaaatgttatatttatttaggtatttgaattattatttaagaattattttagtttttttttttttttttagttttttataattttaatttttaattattaaaatttgatgagatttattttttttagggtttatagaattattttttttttttgtttttaaggtttttattttgttttagaattttttagatttttgagatagttattttttttttttttaggtttttttatttttttttattgatttattttaaagtaaatttgattcggttattatatattttttattgtttataggataaggttaaattttttagtaaattttaatttttttaagaattgttttttatagttagttttatgtgtttattttagaatcgattggattaatttaggagtagttttcggtaagtacggcgtttttttttattttttggttgtcgagggtcgtttttttagaaagtattttttattagttttaagttttttttttttagtaattttgatttttagttttaattttttttaggacgtgttttttatcgtattgttttttttagttttcgttttttttttaggtgtttattatttttttataaattatagttattgttatggtaataattttattattagaaggagttttatgtttagcggattagagttttttgagagtagggattgtggtattattttaagtattgaatttgttttagtaatttttaaataaatatatgttgaatgaatgaatgtagtaataggaatgttgagttaagttttgtttttgttttttgagacggagtttcgttttgttgtttaggttggagtgtagtggttcggttttggtttattgtaagtttcgtttttcgagtttagttatttttttgttttagtttttcgagtagttgggattataggcgttcgttattacgttcggtaattttttgtatttttagtagagtcgggttttattatgttagttaggatggtttcgattttttgatttcgtgattcgttcgtttcggttttttaaagtgttgggattataggcgtgagttatcgttttcggtttgttgagttaagtattaaattatataaaatataggaggagaggaaagtatttagagatacgatagggagaattatttgaaatagtgggattatagattatgtgaattgtgtagagaggtttaaatagtttggggtttttggagggaagggaggtttttgggtggtggagtattggtgtatagaaaaggagatgaattttgagagagaggttttttattgtgaagggtttggtgttggggttaaaggtttggggtttttatttgtttagtatggttttttaaattgtagggttttttttttttgagtggggggtagggggtgttttattttgttgtttaggttggttttaaattcgtgggtttaggtaatttttttatttcgtttttttaaagtgttgggatgataggcgtgagttattaagtttagtagtaggttgtaattaaattatgtatttatggtttttaaaattcgtttaggagttgttataggttcggcgttgtaaaagtaaatatgtttatttagaaaatggggataatttttatgttatagagttgtaaagattaaatgaattaatatagattaatatattgggaatagtgttaagtgtataagtattatgtaaattttagttattatttgttattattgtgtttgttgttatttttttttaggagtttttagggggttaagaagtggtgggaaagaaagaaatgattttaagagtatttaataagggttagaatggaagtgagtaaaaaatgttgaggtttatagtataggttgtattgcggggtttaaattttatgaggttagtagtatttagggtttgtgagttttttagagttgggttttggtggtcgagtttagttttgggggttattgtatttttttttttattataaaatggggtttggaggttcggggcggaagaaaggggtttataatattgtacggttagaggtcgagttaaggttggattcggttagatttttataggttttttttagtttttatattgttttagagtgtggggcgttcggttgggggcgaggtagcggaggtttaaagggggtcgaagttaattggacggtagttcgcgatgggaattacgttttttagtatgcgacggggtaaaggggttttttagtcgcgagtagcgtttcgtaggttttgttgggagtttttattgatttttgtttttttttttattttgattttcgtttttttgttttgggtttcgtttttttttgagagtcgatgatttggtagagtttcgcgagtcgttttttttttttttttttattggtttagtttagttgttattcggttgagaggaggagaagttgtttattgattggtggatttcgtttggcgttaattaggaaaggggggcggggtagtagttggttttattgagtcgttattatcgcgaaaggtcggtttggttgcgatagtttgggtaagaggtgtaggtcggtttggttttttgttattcggagttgggtaagcgggtgggagaatagcgaagatagcgtgagtttgggtcgttgtttcgaggttttcgttcggttttttttgtcgattcgttacgtttgtttggatttaatttttaggttgtcggcgttcgttcgttcgttggtttcgcggtgtgagagggaagtattcgtgtttgtggttggtggttggcgtttggagggttcgtatattcgttcggtcgcgtcgtttgttcgcggtagtcgcgtttttgaatcgcggagtcgtgtttgtgtttgattcgcgggcgtcggtggcgcgcggtcgaggtcggtgtcggcggggcggggcggtcgcggcggaggtagaggaagagggagcgggagttttgcgaggtcgggcgtcgttatggaattgggttcggagttttcgtatcgtcgtcgtatgtttttcgtttgtagtttttttttcgcgtcgtagttcgtcgtgaaggcgttatttggcgttttagtcgtcgggggattgtcgtttgttattaatttgatcgttattatggattagttgtagggtttgggtaggtaaggagagatcggcgggcggtgtttcgggtttttggtttcggtgtcggtttcggagagattaggttaggaaacggatcgggagaagggcgagattcgttcgttcgggttcgtcgttcggggatagtcgggttagggtttgttatgtgtattttcgttcgggcggaatgttgggcgggagaggtcgtcgggattttttaggggaagaggtggagatttttgggtttaagttcgagttaggtttatttttatttttttcggattgtttcgtattttttttttatttttatttttggaagttttttggaatttattttcgcggggaaaattaggtttttttaggtatttatttttattttttgttaaattatttttaggattttcgtttgttgtgatttttgtttttttttaataaaggattatggtatttttttttttggcgtttatgtaaaattattttagtttttcgttttgtgtatatttttgatgtttattttgttgtttttttaaggttaggtttttttatttaatttttagaaagttttttgggttttttttgatagtaaaaaatgtattttacggtgtttttcgcggaagagttattttttttttaatttttggtatttcgtttgttaagtatatgttttgtgcgttttttaatttttgaaaagtagaaagtgttttgtttaatttttatttcgattttgttttagtatttagaatatatgtttttattttaggaaatattttaatatttgttatagttattataatttgtaatgtggtttaaggttatgtttatttatttttttttttttttttgtttaagtgttaattgggtgtttagagtggtaaagtgggatttttgttatttgtggtgtggtttagaaatggtttttggtagtttggttgttttttaattttatggtttattttttgtatgtgattttttaattatattttataaattatttatggtttatttttgttggttttagt

SEQ ID NO: 10 - DNA, 6621 bp, Artificial Sequence
  chemically treated genomic DNA (Homo sapiens)
attgaaattaatagaaataaattatgaatgatttataggatataattaaaaggttatatgtaggagataggttatgagattaagaagtagttaggttgttagaaattatttttaggttatattataagtggtaaagattttattttgttattttgaatatttaattagtatttgggtaaaggagaaaaaaggagtgggtgggtatggttttggattatattgtaggttatgatggttatggtaaatgttggggtattttttaaaataaaagtatgtgttttaagtattgagatagagtcgggatgaaagttgaataggatattttttgttttttagaagttgggaaacgtataagatatgtgtttagtaaacgggatgttagagattgaagggaaagtagttttttcgcgggaaatatcgtgggatgtattttttgttattaggaaaagtttaggaagttttttgaaagttgggtaaaaagatttggttttaggaaagtagtagagtggatattaggaatgtgtatagggcgagggattgagatgattttatataaacgttaggaaagaaaatgttatggttttttgttgagaaggaataaagattatagtaaacgaagattttgaggatggtttagtaaagggtgaaagtgagtgtttagaagagtttgatttttttcgcgggggtagattttaaagagtttttagggatagagatagaaggagagtacggagtaattcgaaaggggtgaaggtgggtttggttcgggtttaggtttaaggatttttatttttttttttggaaggtttcgacggtttttttcgtttaatatttcgttcgggcgggggtgtatatggtaggttttagttcggttgttttcgagcggcgaattcggacggacgggtttcgtttttttttcggttcgttttttggtttgattttttcgaggtcgatatcgaggttaggggttcggagtatcgttcgtcggtttttttttatttgtttagattttgtagttggtttatagtgacggttaggttggtgataggcgatagtttttcggcggttgaagcgttaaatagcgtttttacgacgggttgcgacgcgggaggggggttgtaggcgaagagtatgcggcggcggtgcgggggtttcgggtttagttttatggcggcgttcggtttcgtagagttttcgttttttttttttttgttttcgtcgcgatcgtttcgtttcgtcgatatcggtttcggtcgcgcgttatcggcgttcgcgggttaaatataaatacgatttcgcggtttagggacgcggttgtcgcgggtaagcggcgcggtcgggcgggtgtgcggattttttaggcgttagttattagttataggtacgggtgttttttttttatatcgcgaggttagcgggcgggcgggcgtcggtaatttgaagattaaatttaaataaacgtggcgggtcggtaagagaagtcgggcgagagtttcgaggtaacggtttaggtttacgttgttttcgttgtttttttattcgtttgtttagtttcgggtagtagaaaattaagtcgatttatattttttatttaggttgtcgtagttaggtcggtttttcgcggtaatagcggtttagtggggttagttgttgtttcgttttttttttttagttggcgttaaacggaatttattaattagtaagtaattttttttttttttaatcgaatggtagttaggttgggttaatgagaggggaagaagaaagcggttcgcgggattttgttaggttatcggtttttagaagggggcggagtttagagtagaagagcggggattaaaatgagagggggagtagaggttaatgaaaatttttagtagaatttgcgaggcgttgttcgcggttgaaaggtttttttgtttcgtcgtatgttgggaagcgtagtttttatcgcgagttgtcgtttagttagtttcggttttttttgggttttcgttatttcgtttttagtcgggcgttttatattttgaggtaatgtggaggttaaggaagatttgtggaggtttggtcggatttagttttggttcggtttttaatcgtgtagtattgtggatttttttttttcgtttcgggtttttaggttttattttataatgagggagggaatgtaatgatttttaggattggattcgattattagggtttaattttggagggtttatagattttgggtgttgttggttttatgggatttgaatttcgtagtataatttgtgttgtgggttttagtattttttgtttatttttattttagtttttattggatgtttttagaattattttttttttttttattattttttagttttttgggagtttttagagagaaataatagtaaatataataatagtaaataatagttaaagtttatataatgtttatgtatttgatattgtttttagtgtgttaatttgtattaatttatttaatttttataattttgtgatataggaattatttttattttttaagtgggtatatttatttttatagcgtcgaatttgtggtagtttttagacggattttgagggttataagtgtatgatttaattgtaatttattgttgggtttagtggtttacgtttattattttagtattttgggagggcgaggtgggaggattgtttgagtttacgaatttgagattagtttgggtaataaagtgagatattttttgttttttatttaaaaaaaaaaaattttatagtttgaaaagttatgttggataggtggaaattttaaatttttggttttaatattagattttttatagtgaggaattttttttttaggatttatttttttttttgtgtattagtgttttattatttaggaattttttttttttttagaaattttaggttatttaggtttttttgtatagtttatatggtttgtggttttattgttttaaatagttttttttgtcgtatttttgaatatttttttttttttttgtgttttatgtggtttaatatttggtttaataggtcgggagcggtggtttacgtttgtaattttagtattttgggagatcgaggcgggcggattacggggttaggagatcgagattattttggttaatatggtgaaattcggttttattaaaaatataaaaaattatcgggcgtggtggcgggcgtttgtagttttagttattcgggaggttgaggtagaagaatggttgaattcgggaggcggagtttgtagtgagttaagatcgagttattgtattttagtttgggtaatagagcgagatttcgttttaaaaaataaaaataaaatttggtttaatatttttgttattgtatttatttatttaatatatgtttatttaaggattattagaataaatttagtgtttgaaataatattataatttttgtttttagggagttttggttcgttgagtataaagttttttttaataatggaattattattatgataatagttgtggtttgtggagggatggtgggtatttagaggaggggcggggattggggaaggtagtacggtggggggtacgttttaaaggagattaaaattaaaggttaaggttgttggagaaggggagtttggggttggtgggaagtgttttttaaggaaacggttttcggtagttaggaggtgaggaggaacgtcgtatttgtcgggagttatttttgagttgatttagtcggttttagaatgggtatatgggattggttgtgagggatagtttttgaaaggattggagtttgttgaagagtttggttttattttgtggatagtggagggtgtgtgataatcggattagatttgttttagggtggattagtggaggagagtggggaggtttgaggaaaaaggaggtggttgttttaaaagtttgggagattttgaagtaaggtgggggttttggagataaaggaagggaatgattttgtgagttttgaaggaggtagattttattagattttgataattgagagttaagattgtagggggttagagggaagggaggaggttagaatgatttttaggtaatgatttaagtatttgggtggatgtaatattttaataattggaggtatattttttggaggaatttgatgagtttagttttgtgttggtggattggttggggggtgtagttaggaggtagatttggtgttgattagtatgaagatggtaatgtttattgaggatgtataaagggtttttaggattttggatttggggagtattagtattgaggatttgatgtagtgagataggatcgtaaagttggggttgagatagaaattataagggagtagtcgagtttatagtttagaggtgtatttaggagagttattgaaggtggttagaatgaggttataggtaattatggaaattatgtaggaaggcgaggaggtggttatagaaggttatgggaagggaaaagttggtatagaagttataatatagtttaagtgtgttaaaatgtatgtatataaatatttatggttatgttaattattttagttttaaatagaaagtaattttaatgtttattaataataaaatgggtaaatagaataaagttattttatatagtgatgaaaaggatagaagcgttatttatagtaggagtgaattttatattaattgttaaatataagaaggaagatataaaagagatatgttgtttaggtttggtttatatttgtaattttagtattttgggaggttgaggtaggcgaattatttgaggttaggagttcgagattagtttggttaatatagtgaaattttatttttattaaaaaaaaatatatatatatatatatatatatatatatatgtgtgtatatatatataatatatatatatgtgtatatatatataatatatatatatatgtgtatatatatatatatatatatgtatatatatatatatatatatatgtatatatatatatatatatatatgtatatatatatatatatatatatatgtaatatatatatatatatatatgtaatatatataaatatatatatatatatatatatatatatataaaaattagttatgtatggtggtgtataattgtaattttagttattatggaggttgaggtatgagaattgtttgaatttaggaggtggaggttgtagtgaatcgagattgagttattgtattttagtttgggtgatagggcgagatttcgttttaaaaaaaaaaaaagttagttatggtattagttattttttagaaagatggtggtgattgtaaggggttatgaaggggatattggtaattggttatattttgttttttatttattttttattttttgagatagagttttgttttgtggtttaggttggagtgtagtgatatgattatggtttattatagtttcgaatttttgggtttaagtgatttttttattttagttttttgagtagtttgaattataggtatgtatttataaatttagttaattaaaaattttattttttattttggttgggtatggtggtttacgtttgtaattttagtattttgggaaatcgaggtgggtggattatgaggttaggagttcgagattagtgtggttaatatggtaaaatttcgtttttattaaaaatataaaaaattagtcgggtgtggtggtatacgtttgtaattttagttatttgggagattgaggtagtagaattatttgaatttaggaggcggaggttatagtgaattgagattatgttattgtattttagtttgggtaatagagtaagattttgttttagaaaaaaatatatgtataattttagagacgggagtttaattatgatgtttaggttggttttaaattttcgagtttaagcgattttttcgttttggatttttaaagtgttagtattatatgtatgagttattgtatttggttattttttattttttgatttgggtgttggttatttgagtgtgtttattttgtggaaatttattgagttatatatttaagatttgttagttgttttgtatgaatggtgtattttaatgaaatgtttattattagtgataaaaagtttttttttgatgttatttttttttttaattatatttattttttttttttatagtaaaatttttggtcgggtatagtgatttatatttgtaatttcggtattttgggaggtcgaggttaggagtttaaaattagtttggttaatacggtgaaatattattttggtcgggtatggtggtttacgtttgtaattttagtattttgggaaatcgagatgggtggattatgaggttaggagtttaagattagtttggttaatatagtgaaattttatttttattaaaaatataaaaaattagtggtgcgtggtggtgggtatttgtaattttagttatttgggaggttgaggtaagagaattgtttgaatttgggaagcggtggttgaagtgagtggagatggtattattgtattttagtttgggtgatagtgcgagatttttttttaaaaaaaaaaaaaaaaaagaaaagaaagttttatttttattaaaaatataaa

SEQ ID NO: 11 - DNA, 5310 bp, Artificial Sequence
  chemically treated genomic DNA (Homo sapiens)
aaaaaaaaaaaaaaaaaaattagaaaattaaaaaattaggtcgggtgtagtggtttatgtttgtaattttagtattttgggaggtcgaggtgggtagattatttgaggttaggagtttaagattagtttggttaataaggtaaaattttatttttattaaaaatataaaaattagttgggcgtggtggtattcgtttgtggttttagttatttaggaggttgaggcgggagaatcgtttgaatttaggaggcggaggttgtagtgattttagatcgtattattgtattttaatttgggcgatatagcgagattttattttaaaaaaaaaaaaaaaaattagttaggcgtgatggtatatatttttatttttaattatttgggagggtgaggtgggaggatcgtatttgagtttgataggttgaggttgtagtgagttgtgattatgttattgtattgtatttttgttggggtgatagtaagattttgttttaaaaaaaaaaaaaaaaaaagtttgattgttttagatttattttataatgattaatttgaattaagtcgttttattttttgtttggataattgtaatggagtttttattagtttttttgttttttttgttttttataatttttttaatattatttttttgtttaaaattaatagtggttgttttttttggttttttaagtaggggttaaagtttttataatggtttatatgttttataaggtgtgattttggtttttttatattttgatttattttttatttgttttttttattttagttatattggtttttttgttgttttaagtaatttattgtttcggggtttttgttttgttttttttgtttggaatgttttttttaaagcgtggtttttttattttttttaagtttttgttttaatgttattttatgagtaaggtttttgggtttttttgtttgtttttcgagtttttattattttttgtttttttgtgttttgttttgagtttggggagaatgatttttttagaaagtaatttgggtttttttgttttaggtttttgagtgggtttggtgaatgggaggtgttattaggagatgaaaggtaagaggggagagatgttggggtattttttttttttgtattttttttgttttgttttgggtagtggttgtgtttttttcgattatagttgtatttgggaatggattttatatttttttgtttttttatttacggatttttaataatatgattttttttttgatttttagtttttaaagtagttatgttttttagtttttgtttgtttttttggtgttttaatatttttgttgtttgggttttttgaattttgtttatttttttcgttttttttttaagatttgaatttttcggttgggcgtagtttttaacgtttgtaattttagtattttgggagatcgaggcgggtagattgtttgaggttaggagtttgagattagttcggttaatatggtgaaattttgttttaattaaaaatataaaaattagttggggatggtggtaggtatttgtagttttagttattcgggaggttgaggtaagagaatcgtttgaattcgtgaggcggaggttgtagtgagtcgagatttcgttattgtattttagtttgggtatggtagcgagatgttttaaaaaaaaaaaaaaaagtgtagttgttatggaaaatagtatggtgtttttttaaaaaataaagtaggttggagtgtagtggtgtgattatagtttattgtagttttaattttttgggtttaagttattttttcgttttagttttttgagtagttgggattataggttcgtgttagtaagtttggttaatttttttttttgtattttttgtagagataggggtttcgttgtgttgtttaggttggtgttaaatttttgggtttatttatttattttagttttttaaatgggattataggcgtgaattattgtttattgcgtcgggtttttttgtttttgtttttgtatacggtatatgttattatttaatatattatatttttacgtatttttttatttttttttattttttatattttggatggtaagttcgaaggcgtagggatgtttgtttattgttgtattttaagtggttggtatatcgtcggttgttagtaaatgtttttgaaatgaatgaatgagtgaatgatcgataaggggagttaaggggaaggtagcggtgcggttcgcgtcgtaggtagaagagttgattttttaattttcgttttttttttcgttttcgttcggaatgttgagtgttcgagaaggaggcggaaatgagcgcgtttaatagtttattagtcgggtgtttatttaattagggtttgtatttcgaggttcgtttgtgtttaatcgttcgtttaatggtttcgtttggtttcgggcgggcgcgggggaatttgcgaggcgagcgtaggtttggttattttgtttcgtcgggggtttattttattgcgtcgcgcgggtgcgcgtagatttgattttttttcgggtataaaaagcgttttgcgggagatttaggtcgggagggcgcggagtttagcgagtagttttaggtttttttaatcgcgtggtttatttttagttttagttttagttttagttgttgggtttattcgtcggttaagggaatgttttcgagatattagatgttagttgttcgttgtatttttagttatgaaattggaggattataacgttttttatttttttaatttaggggatgtggggatgttagaaagagagacggttcgttagatatttgagagtaataatattaggtagtatttgggtatttgttgtgtgttagatatgatgtttagcgttttaaattttttaatttatttaatatttatttatgagagggtaaaatattaagattataatagttttatttgatagatgtagaattgaggtttagggggtttattttattttttcgaggttttagcgttattaaggggtgggatttggatttgaatttaggtggggtcggttttaagggtttatgttaggtttgagagagtaagatttttattttcgtaacgtaagtaatttatggtttagttataggtttggcggggaggaggacggatagattattaggttagttttggaaggttaaagaatttgttatttaaaattttaggttgggtttcgttttttacgtttgtaattttagtattttaggaggttaagggaagcggattatttgaggtcgggagttcgagattagtttggttaatatagcgaaatttcgtttttattaaaaatataaaaattagtttggtgtggtagtgggcgtttgtagttttagttattcgggaggttgaggtaggagagtcgtttgaatttgggaggcggaggttgtagtgagtagagatgacgttatcgtattggacgatagtgagattttattttaaaaaaataaataaaataaaaaaatttttttagtttttagttcgttttttaaatttttaaatttgagttggggacggggagggagaaggattaggaggtggtatttagggttttttaaggtagtagtagaaggtgaaggaggagtgaggggataggtgagagagattgatcgggaaagtttagtttcgtggggaagggtttgtggggtagtgattgagatttaggatcgtttttatggttagagtttatttgtgtgtagtaagaggaaagtatttcgtgtttaacgtagtggaatgagagtaacgtagaagaataacgaattttaggtttggcgtttattttttaggaagggtgtgggagagttgttttttaagggagattttttggaggttgttttgcgtagtaagtagtttttatttagattatatatagtattttagattaattttaaaatttttgcgttttaaaaattgtttttatttatattttatagaaagttgagaaagtgttatttatatggggggtaggggtgttggagattatgagattaataataatttttttagttcgtattttttggtattattatagtttttaaattttgggattttttcgattagtttttttttgtttagttgtgaaatggaagaagcggttcgggtgtggcggtttatgtttgtaatttgagtattttgggaggcggaggatcgtttgagtttagaagtttaagattagtttgggtaatatagggtgattttttatttttttttcgttttattatatcgttataaaaaatttttaaaaattagtcgggtgtggtggcgtaagtttgtagttttagcgggagttgagggaggagaatcgttttagttcgggaggtcgaggttgtagtgagtcgagatcgcgttattgtatttttgggcgatagagcgagattttgtttttaaaaaaaaaaaaaaaagaaaaaagaggaagttgtatttaatttagaaacgcggtttttcgggatttgttagttttatatttcggaggatttttttcggcgggttggtacgggaggtggagaaagaggtttgggcggtttcgttgtagtcgcgtgtgggaggacgtacgggtttgttttaaagttttgggataatagcgttttcgggggataatgaatgcggagttttcgtttttagtcgattttagatgtgtttttattttttttcgttgtagtcgtaaggtaaggaaatattttttttttcgtattgaggaggttgaggagtgtattgggtgttttttttttttttaatttagaattgcgagatagaggttgagtttttgtaaagaatagttttagaaaagttaggagagcgtaggagggtattcgggaggttaggaggggttcgttggggttttaatcgtatttatatcggttttatttgcgagggggcgggatttcgtggcgttggattaattagtatttatttgcgtttatttggttttttttcgttggttttcgggggttgcggtgtttaaaggggtaagagttgagcggaatatcggttcgtcgtcgcggtagttgttttatttttttttttgtagttatggggttttttcgtggatttttcgcgttttttttttttttttaggtattttatagtttcgtcgtggtttcgatcgggatcgttttttggggggcgggcggggttcgtatggggtagtggcgtcggggagagcgcggggttgcgttttttggggttaagggagtttcggaaggttcgtgaggattttgcggtgtggggagtgtagggtcgggtacgtttggatttagttttttttattttttgttttcgggcgtagg

SEQ ID NO: 12 - DNA, 5310 bp, Artificial Sequence
  chemically treated genomic DNA (Homo sapiens)
tttgcgttcgagggtagagagtgaaggaggttgggtttaggcgtgttcggttttgtattttttatatcgtagggtttttacgggtttttcgggatttttttggttttagggagcgtagtttcgcgtttttttcgacgttattgttttatgcggatttcgttcgttttttagggagcggtttcggtcggggttacggcgaggttgtggagtatttggagaaggaggagagacgcgagaggtttacgagggagttttatggttgtagagagaggggtgaagtagttgtcgcgacggcgggtcggtgtttcgtttagtttttgtttttttgagtatcgtagttttcgggagttagcgggaggaggttaggtgagcgtaggtgggtgttgattggtttagcgttacgaggtttcgttttttcgtaggtgggatcgatgtgggtgcggttgaggttttagcgaattttttttggtttttcggatgtttttttgcgtttttttggtttttttggagttgttttttatagggatttagtttttgtttcgtagttttgggttagaggagaaaagaatatttagtgtattttttagtttttttagtacgggaagagaaatgtttttttgttttgcggttatagcggaaaaaagtggagatatatttgaagtcgattgaaaacggaggtttcgtatttattatttttcggaggcgttgttattttaaagttttgaagtaggttcgtgcgtttttttatacgcggttatagcggggtcgtttaagtttttttttttatttttcgtgttagttcgtcggggaggatttttcggggtataaaattagtaggtttcgaaggatcgcgtttttgaattggatataattttttttttttttttttttttttttttttggagatagggtttcgttttgtcgtttaggagtgtagtagcgcgatttcggtttattatagtttcgatttttcgggttgaagcgattttttttttttagttttcgttgagattataggtttgcgttattatattcggttaatttttaaaaattttttgtagcgatgtggtggggcggggggagggtggagggttattttatgttgtttaagttggttttgaatttttggatttaagcgatttttcgttttttagagtgtttaggttataggtatgagtcgttatattcggatcgttttttttattttatagttaaataaagggaagttagtcgagaaagttttagagtttggaagttgtagtggtgttaaagggtgcgagttaagagggttgttattagttttataatttttagtatttttattttttatataaataatatttttttaattttttgtaaaatgtaaataaagataatttttaaaacgtagaggttttgaaattggtttgaaatattgtatataatttgggtaaaaattgtttgttgcgtaaagtagtttttagagagttttttttggaaaatagtttttttatattttttttaggagataaacgttagatttgggattcgttgtttttttacgttatttttattttattacgttagatacgaagtgttttttttttgttgtatataagtgggttttggttatgaaaacggttttgagttttaattattattttataagtttttttttacggagttgagttttttcggttagttttttttatttgtttttttattttttttttattttttgttgttgttttgagaagttttggatgttattttttggttttttttttttttcgtttttagtttagatttaggggtttgaggaacggattggagattggagaggtttttttgttttgtttgtttttttgagatggagttttattgtcgtttagtacggtggcgttatttttgtttattgtaattttcgttttttaggtttaagcgatttttttgttttagtttttcgagtagttgggattataggcgtttattattatattaggttaatttttgtatttttagtagagacgggatttcgttatattggttaggttggtttcgaattttcgattttaagtgattcgttttttttggttttttaaagtgttgggattataggcgtgagaaacggggtttagtttggagttttaaatgatagattttttgattttttagggttaatttggtaatttattcgttttttttttcgttaggtttgtggttaagttatggattgtttgcgttgcgagggtgggggttttgtttttttaggtttagtatgggtttttaaggtcggttttatttgggtttaaatttaggttttattttttagtagcgttgaagtttcggggaagtaaaataaattttttgggttttagttttgtatttgttaaatggggttgttatgattttagtattttatttttttatagatgagtattaaataaattagaaggtttaaaacgttaaatattatatttggtatatagtaagtgtttaaatgttgtttggtattattgtttttagatgtttggcgagtcgtttttttttttagtatttttatattttttgaattaagagaatgagaagcgttgtaattttttaattttatggttgagggtataacgagtaattggtatttggtatttcgggagtatttttttagtcggcgggtgagtttagtagttggggttgggattgaggttgggggtggattacgcggttgggaaagtttggggttgttcgttgagtttcgcgttttttcggtttggatttttcgtagggcgttttttatgttcgaggggaggttaggtttacgcgtattcgcgcggcgtaatggagtgggttttcggcgggatagggtggttaggtttacgttcgtttcgtaggttttttcgcgttcgttcggagttagacgaagttattaggcggacggttaaatataaacgagtttcgggatgtaggttttaattaagtaaatattcggttggtgggttgttgagcgcgtttattttcgtttttttttcgggtatttagtatttcggacgggggcggagagaggagcggagattggagagttagtttttttgtttgcgacgcggatcgtatcgttgttttttttttagttttttttgtcggttatttatttatttatttattttaaaaatatttgttgatagtcggcgatgtgttaattatttaagatataatagtgaataaatatttttgcgttttcggatttgttatttagagtgtggagggtagaggaaagtgaaaaaatacgtggaaatataatatgttagatggtaatatgtatcgtgtataagaataaggataggggggttcggcgtagtgggtagtggtttacgtttgtaattttatttagaaggttgaggtgggtggatgagtttaggagtttgatattagtttgggtaatatagcgagatttttgtttttataaaaaatataaaaaaaaaaattagttaggtttgttggtacgggtttgtagttttagttatttagaaggttaaggcgggaggatagtttgagtttaggaggttgaggttgtagtgaattatgattatattattgtattttagtttgttttattttttgaggaaatattatattgttttttatagtaattgtatttttttttttttttttgagatatttcgttgttatgtttaggttggagtgtaatggcgagatttcggtttattgtaattttcgttttacgggtttaagcgatttttttgttttagtttttcgagtagttgggattataggtgtttgttattatttttagttaatttttgtatttttagttgaggtagggttttattatgttggtcgggttgattttaaatttttgattttaggtaatttgttcgtttcgattttttaaagtgttgggattataggcgttagagattgcgtttagtcgggaggtttaagttttaaggaagggacgagagaaatgggtagggtttagggagtttagataataggggtgttgaggtattagagagataaataaaagttggaaggtatgattattttgagaattgaaggttagagaggaaattatgttattggaagttcgtggataaggggatagggaagtgtgggatttatttttaaatgtagttgtgatcgaggaaggtatagttattgtttagagtagagtagagaaagtgtagggaaaaaaaatattttagtatttttttttttttgttttttattttttggtggtattttttatttattaaatttatttagaagtttgaggtaagaaagtttaggttgttttttagaggggttattttttttaggtttaggatagggtatagaagggtagaaaatgatgggaattcggagagtaaataagaaagtttagaggttttatttataaagtggtattagaataaagatttgaaggaagtgaaggaattacgttttggaaagagtattttaggtagagaaaatagggtagaggtttcgagatagtagattatttggaatagtaagaaagttagtgtggttggagtagagagagtaagtaggaagtgagttagagtatgggagggttaggattatattttgtagagtatgtaggttattgtaagaattttggtttttatttggggaattaggggaggtagttattgttggttttgagtagaggagtgatgttgagaaaattataagggataagggaagtagggaggttggtgggggttttattgtagttatttaggtaaaagatgaaacggtttggtttagattggttattatggagtgggtttgaaatagttagattttttttttttttttttttgagatagggttttgttgttattttagtaggggtgtagtgtagtggtatgattatagtttattgtagttttaatttgttaggtttaagtgcgatttttttattttatttttttaagtagttggaaataaaggtgtgtgttattacgtttggttaatttttttttttttttttgagatggagtttcgttgtgtcgtttaggttagggtgtagtggtgcgatttgggattattgtaattttcgttttttaggtttaagcgattttttcgttttagttttttgagtagttggggttataggcgggtgttattacgtttagttaatttttgtatttttaatggagatggggttttgttttgttggttaggttggttttgaatttttgattttaggtgatttgtttatttcgattttttaaagtgttgggattataggtataagttattgtattcggtttaattttttaattttttaattttttttttttttttttt

SEQ ID NO: 13 - DNA, 7040 bp, Artificial Sequence
  chemically treated genomic DNA (Homo sapiens)
atatagtttggtttgagggaagatgttagtatgtgattataaattggataaaattatttaagatagtcgtattttaattagattaaattttaaaattttaaatatttataagtattttatgtttttaaaaatatgagaaatttgtaagatattattaaatttaaaggtttttaaaattagtttgaaatatatttgtatgttttaaaattttttgtgaagtttagttgtatttagataagtaaaattttatttacgtatttttagagttaaaatataaaatttaagcgattagggtaaagtggaagtaattaattttaattttttcgtatggaaatagatagtgtgcgttggttatatttagggacgtgttttatgtaatttataaattaagatttgtttcgattatattatatggattatataaaaattaaagtagttgtatatgtattttattgatatagaaataagtttatgttatattgttaagtataaaatttaaattttagaatgttaatagtataattttattgaagtaaaaaaaaattgatatgttttttaagtttgagtttataatttttgtatgggaatttttagtaaagcgtatatatttatttatagtttaattttttagttttaaaaaaggtaaaagtgaaatttcgataatgaaatttacggttgtaattagtaatattatatttgtacggttgtaatattcgcgtttttcgtattgtaatttttggaatttattgtaatttttcgaattcgttgttattcgagattttttaatttggcggttttttgttaggattcgggcggtcgttaagagtgcgtaggcgtaagcgcggtcgtcgtcggtggggttttatgtgttgttgagattgttgttgagtttttgggtttttttaagattgttttttaaaagacgacgtgatgattttaaagagaaaggaaaatttgttgcgtacgtagaagggtaggttgggcgtattttgagcgtttttcggggatcgacggtttcgtttacgtgttttcgggtattagcgcgtttaaagttcgtgtattaggaaacgtataaaagtattagcgggcgagttcgagggcgagtttacgggtagttaggaggcggcgagggcggtttgttttttagagattggggaattaagaaaggtagagttattttttcggttttagcgtagtaagtgtaggaggtagggagggcgtagcgtttcgtcgtttacggtattcgtggaattcggtgcgcgtttcgggagttggggcggtttaggtttagcgtgtttagaaagttaattacgttggttaggaggacgtttttttattattcgcgatttttaggttttgattaaagttaaattaaaaggagttattcgtttcggtatttgttgttatttttgtgataaatatggtgtttgatacgaaagtattttaatagttatgttgttaattaaagaataaaatacgtaaagtttgtgcgttaagaatacgagagtatttcgttttttaggaggtgtagtttattttgttttttttgttttatatataattttaaggagaattttttgttattaatatattttgttttttgtttttgggggatgatataggtatattgtatttgattagattagtgttaattttttatttacgtttttattatatgttgtattattaatatagtaggattttatatttttaatcgtaaaatttaagagtagaaaaatatttaaattgtatgttagtttaatatgaaaacgagttattttagttttgataggatatttttaaattaatattatttaataaatatgttttttattcgtataagtttatatatatggttttttaaatgagttttataaataataattagtattgaggttttgatttaagtatttgaaattttgttattttttataataattttgagatgggtatattttttttattttgtagataaggaaataggtattgggatggtaagaaatttaggttatttggtttttaatagttttttattattatgttaaagttttatttatttttgagatttaaaatattatatagtgtatatatatttggtaattaaattaggattaaatattaaagttaagggttaagtatagtgttttgtaattttagtattttgggaagttgaggcgggtagatcgtttgattttaggagtttaagattagtttggaaaatatggtgaaattttattttaataaaaaaatataaaaatagttgggtgtggtggtgtgtgtttgtggttttagttatttgggaggttgaggtgggaggatcgtttgagttaaggaggtagaggttgtagtgaattaagattatattattgtattttagtttgggtgatatagtgagacgttgttttaaaaagaaaaaagtaaaattaaagtaagaatataataagaaatatgtttggtattgtgttacggggagaaaaaattaatagggagataaattttgtttttagggtaagtgtaatttgttgagtaaaagaaatattttaagatattttaaaaaagaaaataaaggttgttgtaaattggatatttaattaaatatttttgggtagattggtagatgatagatttaatgaatttggggtttataaatatatagaatgttatatttttattaatattttatgttttgggtaaagagtaaaattaattttgaaaatgaattgtgtatgtaattattttaaaaataaagattatataataagttatattattttgtattatgtgtaatatttagggggttaaggtatttttattttgttaatatttatagtatttttattatataattattttagagttttgaattataattttaattaggtgatagttattgagtaaattttgtaatgtaaatttattatagaatataattgtattattttttttttatttattggtatttttttatatttggggtttgatataattgtatataataatttttttattaaaatattttatagagttggttaggtatggtggtttacgtttgtaattttagtattttgggaggttgaggtaggtggattatttggggttaggagtttgagattagtttggttaatatggtgaaattttatttttattaaaaatataaaagttagttgggtatggtggtatgcgtttgtaattttagttattcgggaggttgaggcgggagaatcgtttgaatttaggtggcggaggttgtagtgagcggagatcgtgttattgtattttagtttgggtaataagagcgaaattttgttttaaaaaaaaaaaaaagattgaggtttaagtaggttaaatattatatatatattagattatatattaagttatataggttgtatagaatagaaattttattttagggttttatagattttaaattgtttttgtaaatggtttatgtttattaatttatttttttaaagttaatatattttaaaaatagaattgttattattaaaatgtggttatatataatttaatatataagtgttttagaagaagggaattttattatttgattttttaaaatatagattttaatatttttgtgtgtgtgtgtttttttatgaatatggtaatattattggttttttttttaaagatatggtatgaaattaattttttgtttagagttaggattttgttttattatttagtttggtgtgtagtggtacgattatagtttattatagttttaaattttttagtttaagttttttttcgttttagtttttaaagtagttaggattataggagtgtattattatatttagttaattttattattattttttgtagaggtaggttttaaatttttggttttaagtggtttttttattttagttttttaaagtattggtattataggtataatttattgtatttggtagaaaattaatttttattataaaaattagaaagaaagattttattgtttgatggttaatattttgaattttattttaatttttggttttttatattatatgtaggtattagtgattttgtgttatttttatttttttagatttttttttttttataatttttttatatgtgttattatttgaagttttgattatagttttgaattatttttatttttttgttttttttaattttggtttaaaatttcggtaatttatttgttacgaagtttagaattttttttgtaagtgagttgatcggttgggttaaatcgttttggaagggaaggattgttaggaagttagtatgttgttaagatgttttgttaatttgttgtgtaagttgtatagagtgttaggggatttttttttttattgatgaatttaggtgtgtgttatgatttgtattagtgattttatttggattgattaaggttgtaattttttatttatatgaatgttgtatttagtttttttttgtaattggttaaataaatgtttgttgtttgtattttaatttttagttaatatttgttggaagtgatttaatgtagttggagaatgatattaataattattatagtttgtaaagtgtgaaataattttattgtgttttgtggtttttttagtttgaggattgataatgtgtagcggatgagatttgaaaaaaacgtattttattataatttaagaaataatgtaaaagaggggtgagttttgaggtagttttatgttgtttgtttggtatgagtttgtttttataagaatttattttaagtgtggaagggaaatgtttttatttgaaagggatagttgtgttttatttcggtttttttttttatttgataaaaatttttgttgagtgatagtatagatgtagtttatttggaataagtgaaggaaaaggagaaaagggatgaggtggagcgaaggagtagttagttatgtttttaaagtttcgcggttttttttagtttttttatttaatttagcggttttggtgtttttttgtaaagtgagatgttttcgtttttggttttacgtttttattttcggagcgagttttttttatcggtggacgcgcggttttgtagtagttttttagagttatttgcgaagttgtttttgggggttatttttttcgggtttcgcggttgtcgcgtcggttggtttggtgttttattgattgggagtaggtgtgtttgttgtagaggttgggagttggagggtttggttcggtgtataaggcgatttatcgcggtgtttttgtggttataaagtaagtgaataagtgtattaagaatcgattagtatttcggcggagtttttgggttgagtttaacgtagtaaggttgcgttacgataatatcgtgcgcgtggtggttgttagtacgcgtacgttcgtagggtttaatagtttagggattattattatggagttcggtggtaacgttattttatattaagttatttatggcgtcgtcggttattttgagggggacgtaggggagttttattgtcgtattggaggatagttaagtttgggaaagtgttttaagtatttattagatgttgtgaacggtttgttttttttttattcgtaaagtattgtgtatttggatttgaagttcgcgaatattttgattagtgagtaggatgtttgtaaaattagtgatttcggttgttttgagaagttggaagatttgttgtgtttttagatatttttttattttttaggaggtatatatatttatcgcgtttcggagtttttgaaaggagagggcgtgacgtttaaagtcgatatttatttttttgttattattttttggtaaatgattattaagtaggcgtcgtattcgggggagcggtagtatatattgtacgcggtggtggtttacgatttgcgttcgttttttttcgttgtcgttttcgaggattcgtttttcgggtagcgttttggggacgttatttagcgttgttggagatttagcgcggcgtagaggtcgagcgcgcggttgtttttggtggattttatttttttgaaagttgaattcggttgattgaaaatttggttaagataagtttttgtttgattttatttgtttttaaaggaagtggagatgtcgaagaaaatatatttgtaggatggagttttagaaaataaagttattaaaaatttttttagtttttagtgttttttttaggatatattagtaaagttataagtttagtatttgttgttttagtattgttagtaattaattttatttatatagttatgtgttttgttttttattgttagtattttatttatttaaatttgttattgataaaagtttgtttaaaatagaattttattgtagaaatgttaaaattttttataaatttatatatattttatatttattatataaattttaattattaatggtgtagttgtttttatattaaattagtaaaaatttttaaaaaaataagtaatgtttttttattattttttttagtaaaattttttgtttgtaatgatttttatttataaaagttatatattgaggtatatttatatttaaaggaattatattataaatgatttattgtaatatttttaatttgtgtattgtaatgagtagaaatattttgttaaaatatttttaaattgggttatttttatttggtattgggatttagaagtagaagataaagattatatgatgtgagaggaaaatgtaggagtagaaggtaaagattatatgatgttaggaattatgaaatttaatatttggatggaagagaatagataaatagaattagattgtttattttagatattaaaataatggatgttggtatataggatttaaaggagaaggtgattggattttgttattgggatagttttgatttttttttagtaatagtagtttttgtgtatggtggaaagtaaggttgatgtaatggttggtagagggaatggtaaggttttgaagtagaggttgtgtatgtattgttaaggagggagaggtaggaagtttaaaagggggttagagatatagaaatgtt

SEQ ID NO: 14 - DNA, 7040 bp, Artificial Sequence
  chemically treated genomic DNA (Homo sapiens)
aatatttttgtgtttttgatttttttttaagttttttgtttttttttttttaatagtgtatgtatagtttttgttttagggttttgttattttttttgttagttattgtattagttttgttttttattatgtatagaaattgttattgttaaaagaaagttaaagttgttttaatgataaaatttaattatttttttttttaaattttatgtattaatatttattgttttgatgtttagagtgggtaatttagttttatttgtttgtttttttttatttaaatgttaaattttatgatttttgatattatataatttttattttttatttttatattttttttttatattatataatttttattttttatttttgagttttaatattaggtaaaaatgatttagtttagaagtgttttagtaaaatgtttttatttattgtaatgtataagttaaagatattataataagttatttatgatataatttttttgaatgtaaatgtattttagtgtatgatttttatgagtgaaggttattataaataagaagttttattggggggagtagtaggaaagtattatttatttttttaaaagtttttattgatttggtgtgggagtaattatattattaatagttggaatttatgtggtaggtatgggatatatatggatttatagaaaattttgatatttttgtagtggagttttattttggataaatttttattaataataaatttaaataaatgaaatattagtaatggaaagtaaagtatatgattatatgaataagattagttattaatagtattgagataataggtattagatttgtagttttgttaatgtgttttagaaaaagtattggagattaaaggagtttttagtaattttattttttaaaattttattttataaatatgtttttttcgatatttttattttttttaaaaataaatagaattagataaaaatttattttgattaggtttttagttagtcgagtttagtttttaaagaggtgagatttattaaaagtagtcgcgcgttcggtttttgcgtcgcgttgggtttttagtagcgttggatgacgtttttaaggcgttgttcggggagcgagttttcgaaaacggtagcggagagggacgggcgtaggtcgtaggttattatcgcgtatagtatgtgttgtcgttttttcgaatacggcgtttgtttggtagttatttgttagagagtgatggtaaaggaataaatgtcggttttaggcgttacgttttttttttttaggagtttcggggcgcggtgggtgtatgtgttttttagagggtaagagggtgtttggaagtatagtagattttttaattttttagagtaatcgaagttattaattttatagatattttgtttattgattaagatgttcgcgggttttaggtttaagtgtataatgttttgcgagtggaggaagagtaggtcgtttataatatttagtgagtatttgagatatttttttaaatttaattgttttttagtgcggtagtgaggtttttttgcgttttttttagggtggtcggcggcgttatagatgatttggtgtaaagtgacgttgttatcgaattttatgatgatggtttttaggttattggattttgcgggcgtgcgcgtgttggtagttattacgcgtacgatgttatcgtggcgtagttttgttacgttgagtttagtttagaaatttcgtcgagatgttagtcggtttttggtgtatttgtttatttgttttatggttataggaatatcgcggtaagtcgttttgtatatcgagttaaattttttagtttttagtttttgtagtaagtatatttgtttttagttaatggagtattaggttagtcggcgcggtagtcgcggggttcgaggaagatggtttttagaagtagtttcgtaggtagttttgagggattgttgtagggtcgcgcgtttatcgatggggaaaattcgtttcggaggtaggggcgtagggttaggggcgagggtattttattttgtagggggatattagggtcgttggattgaatgaagagattaggggaaatcgcgggattttggaaatatgattgattattttttcgttttattttatttttttttttttttttttttatttgttttaaatgagttatatttgtgttgttatttagtaagagtttttattagatggagggagaaatcggaatgaagtatagttattttttttagatgaaagtattttttttttatatttgaagtgaatttttataaaaataagtttatgttagataaatagtatggagttgttttagaatttattttttttttatattattttttaaattataataaaatacgttttttttaagttttattcgttgtatattattagtttttagattaaagagattataaagtataatgaaattgttttatattttgtaggttgtaatgattgttagtgttattttttagttgtattaaattatttttagtaggtattggttaagagttaaaatgtaaatagtagatatttgtttaattaattatagggaaaaattaggtgtaatatttatatggataaaaaattgtaattttaattaatttaaatagaattattgatataggttataatatatatttaaatttattagtggaaaggagaattttttgatattttatgtagtttatatagtaaattagtaagatattttagtaatatattgattttttaataattttttttttttaaggcgatttggtttaatcggttagtttatttgtaagagagattttagatttcgtagtaaatgagttatcgaagttttgaattagagttgggggagataaaagaatagaaatgatttagagttgtgattagggttttaaataataatatatatgggagaattgtagaagaggaaaaatttgaagaaataaaaatggtataaaattattggtatttatatataatgtagaaaattagaagttggaatgaaatttagggtattggttattagataataagatttttttttttgatttttataatgaaaattaattttttattaagtgtagtgagttatgtttataatattagtgttttgggaggttaaggtggaagggttatttgaggttaagaatttgagatttgtttttataaaaaataataataaagttagttgagtgtggtggtgtatttttatagttttagttattttggaggttggggcgggaggagatttgaattgaggagtttgaggttatagtgagttatgatcgtgttattgtatattaggttggatgatggagtaagattttgattttaagtaaaaaattaattttatattatatttttggaaaaaggattaataatattattatatttatgagaaaatatatatatataaaagtgttaggatttatattttaaaaaattaaatggtaaagttttttttttttaaagtatttatgtgttaggttatgtgtaattatattttaatgatagtagttttgtttttgaagtatattgattttgagaaggtaaattaataaatatgaattatttatagaaataatttgaggtttgtgaagttttggaataggatttttattttatataatttgtgtggtttagtatgtgatttagtgtgtgtataatatttaatttgtttgagttttaattttttttttttttttgagatagagtttcgtttttgttgtttaggttggagtgtaatggtacgattttcgtttattgtaattttcgttatttgggtttaagcgattttttcgttttagtttttcgagtagttgggattataggcgtatgttattatgtttagttaatttttgtatttttagtagagatggggttttattatgttggttaggttggttttaaatttttgattttaggtgatttatttgttttagttttttaaagtgttaggattataggcgtgagttattatgtttggttaattttatggaatattttagtagaaagattgttgtgtgtaattgtgttaaattttaaatataaaaggatgttaatgaatagagaaaaagtaatataattatattttataataaatttatattgtaaaatttatttagtaattgttatttagttaggattataatttagggttttgaaatggttatataataggagtgttgtgaatattagtagaatgagagtgttttaattttttagatattatatataatgtaagataatgtgatttattatataatttttatttttaagataattgtatatataatttatttttaaagttggttttattttttatttaaaatataaggtattagtgaaaatgtggtattttgtgtatttataaattttaagtttattagatttattatttgttaatttgtttaagaatatttaattgaatatttaatttataatagtttttgtttttttttttaaggtattttaaaatattttttttatttagtaaattgtatttattttgaaagtaggatttatttttttattgatttttttttttcgtaatatagtgttaaatatattttttattatgtttttattttaattttgtttttttttttttgagatagcgttttattatgttatttaggttggagtgtagtggtgtgattttggtttattgtaatttttgtttttttggtttaagcgatttttttattttagttttttaagtagttgggattataggtatatattattatatttaattatttttgtatttttttgttgagatggggttttattatgttttttaggttggttttgaatttttgaggttaagcgatttgttcgttttagttttttaaaatgttaggattatagggtattgtgtttggtttttaattttaatgtttaattttgatttggttattaaatatgtgtgtattatgtaatattttggattttaaaaatgggtaaagttttagtatggtggtaaaaggttattaggggttagatggtttgggttttttattattttagtgtttgtttttttatttgtaaaatgaggaaaatatgtttattttaggattgttgtgaagagtaatagagttttaaatatttagattagggttttaatgttaattattatttataaaatttatttaaaaaattatgtgtatgggtttatacgaataagaaatatatttgttaggtagtattggtttaaaagtattttattagggttgaaataattcgtttttatgttaaattaatatataatttgagtatttttttgtttttgaattttgcggttaaaggtataaaattttgttgtattaatggtatagtatgtagtaaaaacgtgggtggaaggttaatattaatttgattaaatgtaatatgtttatgttattttttaaaggtaaagagtaaaatgtgttgataataaggaattttttttggaattatatatgaaataaaggagataagataaattgtattttttgaggagcgaaatgttttcgtgtttttagcgtataggttttacgtgttttgttttttgattggtagtatgattattaagatattttcgtattaaatattatatttattataagagtaataatagatatcggaacggatagttttttttaatttgattttaattagagtttgaggatcgcggatagtgggagaacgtttttttgattaacgtggttggttttttgggtacgttgggtttgagtcgttttagttttcggggcgcgtatcgggttttacgggtatcgtggacggcggggcgttgcgttttttttgttttttgtatttgttgcgttggggtcgaggaggtggttttgttttttttgattttttagtttttggaagataagtcgttttcgtcgttttttggttattcgtgggttcgttttcgggttcgttcgttggtgtttttgtgcgttttttagtgtacgggttttgggcgcgttggtgttcggaagtacgtgggcgaggtcgtcggttttcgaaagacgtttagagtgcgtttagtttgtttttttgcgtacgtaataaatttttttttttttttagagttattacgtcgttttttggaaggtagttttaaaaaggtttagaagtttaatagtagttttaatagtatataaaattttatcgacggcggtcgcgtttgcgtttgcgtatttttgacggtcgttcgagttttggtaggggatcgttaggttaagagatttcgggtgatagcggattcgagaggttatagtggattttagaggttatagtgcgaagagcgcgagtattgtaatcgtgtaagtgtggtattgttggttataatcgtggattttattgtcgaaattttatttttgttttttttaagattaaaaagttaagttgtagatgaatatatacgttttattaaaaatttttatataaagattatagatttaaatttgaaaaatatattaatttttttttattttagtgggattatattattgatattttaaaatttgaattttatatttagtaatataatatagatttgtttttatgttagtaaagtatatatatagttattttaatttttatatggtttatataatatggtcggggtagattttagtttgtggattgtatggagtacgtttttggatgtgattagcgtatattatttgtttttatgcggggaggttggggttggttgtttttattttgttttgatcgtttgggttttgtattttgattttggagatacgtaaataaaattttatttgtttaaatatagttaaattttataaaaggttttaagatatataaatgtgttttaaattggttttggaaatttttgaatttaatgatattttgtaagttttttatgtttttaagaatataaaatgtttatagatatttgaaattttgaaatttgatttgattaaaatgcggttgttttgaatgattttgtttaatttatgattatatattggtatttttttttaagttagattatgt

SEQ ID NO: 15 - DNA, 5942 bp, Artificial Sequence
  chemically treated genomic DNA (Homo sapiens)
taaggattaggattttaatataaatttagttttttattttttcgggttttttatgtttttttaaattcggtcgttttttatagttttttgtttttgggtttttttttatattttttattatttttttatttcgtatttaagattttatgaaaggtttttttagaaaagaaaaaatgaggagttttgcgatttgaatagtttttttttgttcgtttgtaaatttgaatttttggattttataatagtgagttttttttgtgtttattattcggtatgagtaagataagggggtgggtggtgggagagtggggaagtgtgggaaagaaaagtgtagataaatgggtggaataaagaagtttgatttaaagtttagatttgggggttagagttttggttttagtttaattaagtgtataagtttgataatcgtgggtttttttattatattggttttttttagtaaaattttatttatttttatttttagaggttttgattttttttattattttgtattataatatttgataatatgggtcgggagtggtggtttatgtttgtaattttagtattttgggaagtcgaggtcggcggattatttgaggtcgggagtttaagattagtttggttaatatggagaaatttcgtttttattaaaaatataaaattagttgggcgtggtggggtatgtttgtaattttagttattggggaggttgaggtaggagaattttttgaattcggggggtagaggttgtggtgagtcgagattatgttattgtattttagtttgggtaatgagagcgaaattgtattttaaaaaaaaaagaaaaaaattgataatatggtattttttttttttagttgtgaattttttgagggttgggaatgtttttatttgtatttttggtatatagtatatggatttatgtttgtgaaattagtgaattggttgtagttagggaattttttttgggggaagtgagatttgtacgaagttgggtaatttttggtttaggggggttgaaagaataggtgggggatttttaggagggtttgggatttgaaagtgaatttagattggtagggaggtgattttattatgttatttggagaggttgttttttttgatttaggtgggatttgtatgtggtttttaggtttttgtttggtttttttaaaatagtttttagaaaagtgaataaattataaatggttgatttatttttgatttttagttcgttttttacgaagatagagtttattgattaaaaattttaggatttgtatttgggtagattttaggaaggggaagttaaagggtttaggttagaggtttaagtttagattttagtagtagattagggttagattttattaaagttagaattcgaggtttatgtaagtttttagatttcgtttttaagttttgtttttttttttttttttttttttttttttttagtttagtgtggttattcgagggggttttttttttttagttatagttcgggtattttaagttgggaaatgtgttattcggggttggggtgttgatttgtagtttagttttttttggttttttttgaggatagtggggatgggattggtacggtttttatttcggggttttagttttatttttggtttttagtttttttttagtagtagtttgaagttcgggttggagatgggtattttaagtggaaggttgggaggttgaggattttgcgatagtgatagtaggtgagtagtggatgtgcggtggttggaattttggaagtgggtgttatagttttcgtagtattggagggagggagtaggagatttgtagagaaagaagaaaaagtattaagggtaggggaaggaaaaggggaagagttgaggttttagagggggttggtagggtagaataggatttttttagtttttttgttaaggaataaattgttagttaggtatagtggtttacgtttgtaattttaatattttgggaggtagaggcgggtagatggttttgagtttaggagtttgagattagtttgggtaaaatggtaacgtttgtttttttttttttttttttttgagatggagttttgttttgttgtttaggttggagtgtagtgttatgattttggtttattgtaatttttattttagcgatttttttgtattagttttttaagtagtcgggattataggtatatgttattatgtttcggtaaagtttgttttttataaaaaatatgtttgagtttaggaagcggaggttgtagtgagttgaaattatattattgtatattagtttgggcgatagagtgagatgagtgagattttgttttaaaaaaaaaaaaaaaaaaaaaaaaagggataaattgtttttttttttatttaatagtgagggatttaggttggtttaaaggtggtggtgagttatttgaattaattgtttatttagttatagattaaattttttattttatttttttttttttttttattattgtatttgatttgttttaaaaataaatttttttaaattattgtgggatttagagtagaatagttgaaagaaaaaaatggtaattagatttagtaaatttttgggtaaggggagggatattagttataatgattatagttaatatttatgtattgtatattatgcggtatgtattattttagtattttatatatattaatttattgaattttaataacgatttttattatttttatttttaagatgagaaaattggaatatgtagatattaggttgtttgtttaagtaagtggaattaggttttaaatttagggagtttatgtttataattatttgattatattattttgttaatttatatatgaggataaggaaagaattttttagtattgtgttggggcgtttggtgtggtgtggttgggagaggtagaatataatgagatatgggtttgagttaaagtttttttttatcggtttttcgggttttttgtttttttatggttttttttgattatgcgggttattttagggaagttagtttttttagcgagttgagtcgtatttttgttatttagtttatagatttttatttaggtagttttacggtttaggagatagtttatagttgttttttggttcgttcgagtagtatatattagtggggtttattagaaggtatttcgggcgttgatattttttttagttttttttgttttatgcggttttagtagttttttaagttttggtaggttttttttttgggttgtttttagtattcggtgagttattttatttttagttttaagggattttttttgtttatgtttttttgatgttttttttgttattgtttttgttgttggtgtttttattattttttttttttttttttttttttttttggtaggtttagtttgagatttttgggagttaggagcgttgtttttatttttaattagggttttatagaaagttcgggttgtagttttatttagggtggattttggtttttcgggttgtggttgttgttgtttatttttttagaggtcgttggggttagtggttggggtgaaggtgatgagtaagggtcgggatatggtttttgggagaattgagaaaatgatattaggtaagggaaggatgagataagtaagttaagttcgtggtgattttgtagtaattatagttttagagatttgttgggatgagaaaaagtagttaaaaatatttttttgttattaaagtaattttataatttaggattttgtagggtttaagggagagagattttgcgtaaaaatatggaattttataatatcgattttgttttttagtaaagattaataaaattttatgagattgttgtttagaggttttgcgttcggtttttatttttatttttattaataataaatattagtttttttttgaaattatttttttatttcgtaagatatattagtaggaaaaaaaaattagtttggttttttaagtttttcgcgattttatttcggagttttttttttttaaataaaaatagatgggttattttttagaagatttcggggagagttttttatacgtgttgttgtgtagttttcgtatcgtaaaatggcgttattttaattagaagagttgatataattaaatagttatacggtacgaagacgtatgcgtggcgataataataataaaaattataatttatattatttgagggttcgggcgtgcgtaaagtttcgggtttagtttttcgcgttggaatttttttaatagtaaacgagtaaagtttcgcgcgtttaggtggcgcgagtattaggatttgtcggttggggttttatttttatataacgtttttataatgtttttcgttttttttaacgtggttttcgttttaagtttattttttggagttaggaatttattttgtgggttaggaaaggtttttaggaggcggagggaaatttgtggaatgtcgagaagtcgtgtaatgaaataacgttacgtttgttttttattattattttgattagggttcgaaggttatatttagagtttaaggggaaatggagaagtgtaaagggacgagtagaatggttggtattattttaggttagcgtattgggacgttttagtttttatatcgtttattttattttatttaagtttttacgtacggagttaagtcgtatttttttttttatgaggtaggagttcggaggaaatagtatgttcgttaagggtttttggcgggattgattcgtattaggggtttaataggtaataaggatttagcggattggtcgaggataggttagttttttgggtagtagcgtcgcgtcgggattagaggggaacgtgaggagagttgcggaaagagatttagtttggttttttttttttttcgttttaagttagtttttttatttagtgagtataaaattgtattgtttagattttcgggtttcgaacgttatatttggttttcgttttcggtggtttttcgttgtgtttcgttcgtaagcgttttttttcgggttttcgtgatagttaggtcgtgcgcgggttattttgggattggtagttcgtttttttttatttagttagtttttttttttatcggggatttcgtgtttcggtatttatcgcggtatttgatttttggcgtttgcgtgttgtttttttttttattttttttaatttttattttttttattttatttcgtttgtcgcggtcgggttcgcggtttgcgttgtagcggtcgtcgtcgttttttggaagtagtaatttttttattttattttagttttggttttcgtttagtcggtgagtttgaagtcgtcgttgtttcgagttttttgtcgttgggagcggtatatggggttttcggattttgatgtgggggcgggggaggaagcgattaggttcggtacgaaggagggagaggtggtttgaggagcggaggggggatgtgtggatttcggtgaaagggatttgataatcgtttttaattcgtgagaaaaggaggagttcggtttttgtttgagaatgataaatttggaaatttttgggaaaggcgtgggggttatgtagagatttgtattggtagggagtttgagtcgaggtttttgtcggagttgatatagaggagagagggttttggttttcgggagttttagggatgtgggtcgggttggtgggttaaagtatttgttggttttttttaagtggtgggattttaaagaatgtttaattttaaagaaaaggggttgagatgtaaattagaggagttggagaggagtgttttagagtttgggttgttttaagaaagggtggtttcgaattttttcgtggttggagggtcgaatgtgggaggagggaggatattagaggtagggaaggagaatttgagttttattgatattgttttttttttagt

SEQ ID NO: 16 - DNA, 5942 bp, Artificial Sequence
  chemically treated genomic DNA (Homo sapiens)
gttagaaaaagaatagtgttagtaaagtttaagttttttttttttgtttttggtattttttttttttttatattcggttttttaattacgggagaattcggaattatttttttttaaagtaatttaaattttgaagtatttttttttagtttttttaatttatattttagttttttttttttgaagttaaatattttttggggttttattatttgaaagaagttaatagatattttgatttattagttcgatttatatttttggagttttcgaaggttagggtttttttttttttgtgttaatttcggtagggatttcgatttaggttttttattaatataagtttttgtatgatttttacgttttttttaagggtttttaagtttattatttttaagtaagaatcgggttttttttttttttacgggttgggggcgattgttaggttttttttatcggaatttatatatttttttttcgttttttaggttatttttttttttttcgtgtcggatttggtcgttttttttttcgtttttatattaaagttcggagattttatgtgtcgtttttagcgataagggattcggagtagcgacgattttagatttatcggttggacggggattaggattggggtggggtagggaagttgttatttttagggaacggcggcgatcgttatagcgtaggtcgcggattcgatcgcggtaggcgaagtggggtggggggagtggaaattagggagggtggggaagagggtaatacgtaagcgttaagggttaggtgtcgcggtggatgtcgggatacggagttttcggtagagaaagaaattggttaaatgagagaaagcgaattattaattttaggatgattcgcgtacgatttggttgttacgaaggttcggaggagggcgtttgcgggcggggtataacgagaagttatcggaagcggaagttaggtatggcgttcggggttcgggagtttgggtaatatagttttgtgtttattgggtgaagaggttgatttagggcggggaaaggaggaagttaggttggattttttttcgtagttttttttacgtttttttttagtttcggcgcggcgttgttgtttaggggattggtttattttcggttaattcgttgggtttttattgtttgttgggtttttagtgcgaattagtttcgttagagatttttgacgggtatattgtttttttcgggtttttgttttatgaggggagaggtgcggtttggtttcgtgcgtagggatttgggtggggtggggtgggcggtgtgagaattggaacgttttagtgcgttaatttgaggtggtgttagttattttgttcgtttttttgtatttttttatttttttttaggttttaagtgtgattttcgaattttggttagagtaatggtgaggggtaggcgtgacgttattttattatacggtttttcggtattttataggttttttttcgttttttgagggttttttttaatttatagagtggatttttggttttagaaaatgggtttggagcgggggttacgttgaggaaggcgaagggtattgtgggggcgttatgtaaaagtaggattttaatcgatagattttagtgttcgcgttatttgggcgcgcggagttttgttcgtttattattgaaaaagttttagcgcgggaaattgaattcggagttttgcgtacgttcgagtttttaagtaatgtgggttgtggtttttgttgttgttgtcgttacgtatgcgttttcgtgtcgtgtggttatttgattgtgttaatttttttgattagaatggcgttattttgcggtacggaagttatatagtaatacgtataggagatttttttcgagattttttagggagtgatttatttatttttgtttgggaagaggaaatttcgaaatgggatcgcggaagatttaaagggttaggttgattttttttttttattggtatgttttacggggtgggaaagtggttttagaaagaggttggtgtttattgttggtgaggatgggggtgggggtcggacgtaggatttttggataatagttttatggagttttattaatttttattaaggagtaaagtcggtattgtagggttttatgtttttacgtaaagttttttttttttaggttttgtagagttttaagttgtggggttattttagtggtaggaaagtgtttttgattatttttttttattttagtaggtttttgaggttgtggttgttatagggttattacgagtttggtttatttgttttattttttttttgtttggtattatttttttagtttttttaaaagttatgtttcggtttttgtttattatttttattttagttattgattttagcgatttttggaaggatgggtagtagtagttatagttcgagaagttagagtttattttggatggggttgtagttcgagttttttatgaggttttgattggggatgagagtagcgtttttgatttttagagattttagattgaatttgttagagaaagaaagagaaagaaaagaagaataatgaaggtattagtagtagaagtagtggtagaaggagtattaggaagatatggataagggagattttttgaggttgaggataagatgatttatcggatattgagggtagtttaggagggggatttgttagaatttaggagattgttggaatcgtatgaggtaggaggagttggggggaatattaacgttcgggatgttttttggtggattttattgatgtgtgttgttcgagcgggttagggggtagttgtgagttattttttgggtcgtggggttgtttgggtgggggtttgtgagttgagtggtagggatgcggtttagttcgttgaagaagttggtttttttgaggtagttcgtatggttagggagagttatggagagataaggagttcggaaaatcggtaaggggaaattttagtttagatttatgttttattgtgttttgttttttttagttatattatattagacgttttagtatagtgttgaagagttttttttttatttttatgtgtaggttgatagggtagtatagttaagtggttataaatatgagttttttggatttaaagtttgattttatttatttgggtaaataatttaatgtttatatgttttagtttttttattttagaaatgggggtagtaagaatcgttgttaggatttaatgggttaatatatgtaaaatgttagaatagtgtatgtcgtatagtatgtaatatatgaatgttagttatagttattatgattaatgtttttttttttgtttaagagtttgttaggtttggttattattttttttttttaattattttgttttggattttataatggtttaaagaaatttgtttttaagataagttaagtgtagtagtgagaaggaggggaaaagtggagtaaggagtttgatttgtaattgagtgaataattaatttagataatttattattatttttggattagtttggattttttattgttaagtaggaaggaaggtaatttgtttttttttttttttttttttttttttttgagataaagttttatttattttattttgtcgtttaggttggtgtgtaatggtgtgattttagtttattgtaattttcgttttttgggtttaagtatattttttgtagaaagtaggttttgtcgggatatggtggtatgtgtttgtaatttcggttatttgggaggttgatgtaggagaatcgttaaggtggaagttgtagtgagttaggattatggtattgtattttaatttgggtagtagagtaagattttattttaaaaaaaaaaaaaaaaaaaagtaggcgttgttattttgtttaggttggttttaaatttttgagtttaaagttatttgttcgtttttgttttttaaagtgttgggattataggcgtgagttattatgtttagttggtaatttgttttttagtagaaaagttgaaaagattttattttattttgttagttttttttgaggttttaattttttttttttttttttttttgtttttaatgtttttttttttttttttgtaggttttttattttttttttttagtattgcgagaattgtgatatttatttttaagattttaattatcgtatatttattgtttatttgttgttattgtcgtagggtttttagttttttaattttttatttggggtgtttatttttagttcgggttttaaattgttgttgagggggggttgggagttaggaatggggttgggatttcggggtgagggtcgtgttaattttatttttattgtttttaagagagattaggaaggattaggttatagattagtattttagtttcgagtgatatattttttagtttgggatattcgagttgtggttgggagggagagattttttcgggtggttatattgagttggagggaggagagaaggagggaggagaaagatagggtttgggagcgggatttaaggatttatatgaatttcgagttttgattttggtaaagtttgattttagtttgttgttgaagtttgaatttgggtttttgatttgggttttttgattttttttttttgggatttgtttagatgtagattttgaagtttttggttaataggttttgttttcgtgagagacgggttgagagttagaaataaattaattatttgtggtttatttatttttttggaagttattttgaggaagttaaatagaagtttgggagttatatgtaagttttatttgagttagaaggggtagtttttttaggtggtatgataaggttatttttttgttaatttgggtttatttttaggttttagatttttttgggagttttttatttatttttttaatttttttggattaagaattgtttagtttcgtgtaagttttattttttttaggaggagttttttgattatagttaatttattgattttataaatataagtttatatattatgtgttaagaatataggtaaagatatttttaatttttaaagagtttatagttggagagggaaagtgttatgttattaattttttttttttttttttgagatgtagtttcgtttttattgtttaggttggagtgtaatggtatgatttcggtttattataatttttgtttttcgagtttaagggatttttttgttttagtttttttagtagttgggattataggtatgttttattacgtttagttaattttgtatttttagtagagacggggtttttttatgttggttaagttggttttgaattttcgattttaggtgattcgtcggtttcggttttttaaagtgttggggttgtaggtatgaattattattttcggtttatgttattaaatattataatgtagggtgataagggaagttaaggtttttagagatgagaatgggtagggttttgttggaagaggttagtgtgataggagggtttacgattattaagtttgtatatttagttgaattgggattagaattttagtttttaaatttaaattttaagttaaatttttttgttttatttatttgtttatattttttttttttatatttttttatttttttattatttatttttttgttttgtttatgtcgggtggtaggtataagaagagtttattgttgtgaaatttaggaatttaaatttgtagacgggtaggggagggttgtttaagtcgtaagattttttatttttttttttttgggaaagttttttatgaagttttggatgcgaaatggaggagtggtgggggatgtggaaaagaatttaggggtagggggttgtagggggcgatcgagtttagggaagtatgagaaattcgggaaaatggggagttgggtttatattaaggttttggtttttg

SEQ ID NO: 17 - DNA, 18997 bp, Artificial Sequence
  chemically treated genomic DNA (Homo sapiens)
atatttggtgatttttgtatttgatggattagttggtattatttagattgatgaattggtttatttgattttgtagcgttttttatttaggaatttagggtaagaagatagttttgattttttatgattttattttcgattattaggattcgtggtttattggtttttttaattaagttgtttttaaaaattttgattttcgaatgtttggggagattgatttgagtaataataaaatttcgtttttttgtatagttggttgtgtatgaattattttttttttattttaattgtttagttttgatgaattagttttgtttaggtagcgggtaaggtgaattttttgggaggttataaattttttttttatgattgtaagttattattgagtattttaaaagtaggtggagttgataaattgatagtttaggtttggtagttatagattatttttgttttaaatgggtattattgttatttgaataaattgtgaataaggtatatttttttgattgaatatagaaatgagtggaatagtttataagttgttttgtttaatgatagttattagttataagtggttatttagatttaaataaaagttaaataaaatttttttagttatattgtaattaagtatttttatttttttaagagatagtttaatgatttttaaaaaattttttttttttttttttttttttttattttttttttagttttttagaaatgtaattgtagttttttattttttttttattagatattttttatggggtaggtttatttaattatgtgtttagaagttttagagaggaatttttatttatcgggaggttgttttgagagataatagtttatttataatttaaagtatgtttgttataaagtttttttttatttggagagttttggttatttttataatttagttttgtttataaaaggtattagtagttattgtttagtagataaggtattgaaggtagtatgtagattttttaattattcgtttttttttttcgtgttatttatgttagtattttatgttttattttaaaagtattttttttttgttttaaaagtgaaatggtatttttaaggtagaaaattagtatttttttttttaaggtagttttggaataaaatattattttttttatattagattttatttttgttaagtggattttgtaagtagcgagagagtgaatttgtatttgggttataatattaattagtttaagtgtttaatagttatatatgtttagtagttattatattgggtagtgtagagatattgttatagaaaattttattgtatattgttgtttaggtattgatgattttagttttatgttgtggtgagtgatttgtttttggaaaggataatatagtggatttattttcgggtgttagtaagggggtaaaattgaggtttttttgagatttttaaatagttaggagggagggaaattagataaaggagttgaaaagttgttttattttattagaaattgaaaggatgaagggatatgggtttattgaagatatttattgttttattaggatttgattagaaatttgatattttaaaaatttgattttgtgttgtttgtaatttgattttttttaaatttttatttttgaaaataataatttattttatttgttttattaggaaataaggagagggggttttggttatattggggttaaagtttagaaggtagagattatatatgtaatagtagttaatagaagtaaagaggggaattttaaggtaaacgtgataatgtaagggaaaggaaatggaaaagatatttttttttatgcggagattttttttagaagagttattgtttatttaaattttggaggatttgtgttttttttggtaaataatgtgatttttttttgtagaggatgtatgatgtaaaattatggattttgtttttaagggaatttttttgtttttttatttttttattgttttatgtaatgaaatttttaaagtatattttgattttagttttagtttataaattagatttgttttttaagagttatttgagttgtagtttttttagtgttattttttgtatatttaaattattgggggcgttgtagtttggttaatttttaattatttagagaattaggagaagtagatatggttaattattaggattaatgatagttaataagagtaaatatttattgaatatttattgtttgttaaatattatgttaatagtttaatgtttaatattattttatttaatttttatataattttaatgagttaggtattgttatttttgttttatagaaaaggaaaatgagattgttagattgagtaatttgttttagattagataattagtaaatagtagaattaaggtttaaatttaggattgtttgattttagagtttgtatttttatttattattttggataagaattttaaattatattaatattttgatttaaattaattgaaattaatattagtgttagtaattttttattgatagattagttaaaaatgttttaatgattatagaattataaattgaatagagaagtaggtttttttttgttgttttaagtagtttagaaaagttttagtgtagtatattggtgtgattagtaggttttagaaataaatgtatttaataagtttatttggtgttttttattttttttttttttttgtgagagtttttggggagattttaatgatgatagttgatatggattaaaggtagataaaatataagggagaaaatattggaaggagtttggttgatggaatagaaattttttgaagaatttatatttgaatgattaaaaagtattagtttagtttgtaaagtttgaagttgaatattcgtgaggaagttatttttttatttgttgatgaggtagagagaaaggtttaatttgttagagaaattgatgttttttgttatattatattgaaataagaattagtttgttatttatttttttttttttttttttagtaatataggtttaggttgaatttatgtttatatagttgtataaatttttacgggtatgaatataaatttatttatttaaatagattttaaaggttttttaggttattttttttttttttagaatttaagtaaggttttgattattattgataatatattcgttagttaatgcgtgtagagtttttagtttaaaggtaaataaaaagtgaaaaggggtcggcgtagtggtttatttttataattttagtattttgggaggttgaagtaggtagattatttgaggttaggagtttaagattagtttggttaatatggcgaaatttcgtttttattaaaaatataaaaattagtcgggcgtggtggtaggtgtttttaattttagttattcgggaggttgaggtaggagaatggtttgaatttaggaggtggaggttgtagtgagtcgagatcgtattatttattgtattttagtttgggtgataagagtaaaattttattttaaaaaaaaaaaaaaaaaaagtgaaaaggtaggaacgttgttgtttatttgttgttttaggaattttgtttacgtatagtttaaaatattaagaagttgaaaataaagtatttggttatgtgtggaaaaatttatagttaaaaggtgagatgaattgggtttagaaggtcggatttacgtgaaattaaaagggtaacgaaagttagaatttaattttttaaaaaaagttaaaataggtcgggtgtagtggtttatgtttgtaattttagtattttgggaggtcgaggttggcggattataaggttaggagttcgggattagtttggttaataatggtgaaatttcgtttttattgaaaatataaaaattagtcgggcgtggtggcgcgtgtttgtagttttagttattagggaggcggaggttgtagtgggtcgagatcgcgatattgtattttagtttggtcgatagagtaaggtttcgttttaaaaaaaaaaaaaaaaaaatagttaaaatttttaaaataattttatttgttaaaatataaaatttgaaattattttagttttttttgtaaaatgagttggagagagtagggttgaattaggtatgttttttcgggtttttcgacgttgatatttcgggatattatattaggtttaagatattagtttgcggaaagagagttgttaaatttgattatatgttttttgtacgatattcgatagttgtttttttttttattagtttttttaaggttgtaaatatatttgatttacgtgagagtttttataagttagtataacgttaggttttaaggaggcgtttaataaatgttggtattgtagggttagatttcgagttttagtttagaattttgttgaggttaggttttttttttgtttttcgttttttattatatttatttatttttttaagtaattaagtttaaattggggtttgtgtagtgattggtcgcgtcgggttttattgcggatgaatttgatttgttttaatgatttgtgatagatatttgtagatagcgtttttaatagaattagggttaggttggtattaaattttaggaacgttaggtattgttttaaagtagatgtaaatcgttaaattttttaggatttagaaggattagagagagtcggatatttttggttagttacgcggtttttagtaaagtttattttttttttttttttagtgtgttttgttgttagagtaattgtgggcgttatcgagttgacgggcggaaatagaatagaaagagtatacgtttttagtttattgatagggttattgcgtagacgtattaatttttttgagttgtagttgagtttgttgatgtagttcgcgtttgcgtattagttgttacgcgttttggtcggttttagcgtttgcgtaaattggtatatcggggagggcggagttaggttacgagggtgcgtatgcgtaaatagtatattcggtgtggtcgacgggttttttaagagtttggggcgcggattggagtattttgcgtgtagttatgtcggcgtcggtagtgtttgttatttcgcggtttttagaagagtatttgagttttatttcgtagcgtttgaagttgttggacgcgtatttgttgtatatattgttgatcggggcgttgtagttcggttattgttttttcgtggggatttttttttttaatttttttttttcgggttttattttttgtgtggggagttttattttagcgggtaatggttttataagtgattataataataatgtgttattttggtgtgttgtttttgtttttatagtattttatattagattatcgttttttgaagttatgagaagagtttgtattgtttttttgttgtgaatggggaaattgaggtttagaaagtttagattatatgtttaatattaaacggtttcgtaggagttggatttaaaagtttaaagaaattattttcgtgtcgttattttatttggtgatttattttatttaatattggttcggggaaaattttattttaattttaatttaggtttaatataattttaaaattagtagattttttaaatgaaaaatttaattttgaattatttttgttattttggtttaattattattaattttcggtgaaacgttttaatgaaagtgtaaagaatataaatattggtgttttttttgttgaattattttttatttgattttgttttttagttgttattatttttttttttgttgaggaagttgttattttattgttttgaatttaatttttgtttatataattttattttagttttatttttttttttgattttaggatttggtaattttgtagattgttatatttagcgagaatagtttttattaatttttgttaaaatttgattttttttgtttaacggggatttagtgaatattgaaaataggcgtggtttttattattggtattatttgttattttgattttgaaaatatgttagtatttatggtttttttttagtgtgattattagttaggttattagttgtatttttagtttaatatgaggtattatggtaaaagttttggtatatgttttttattcgtaaagagtttatggtttagttggggtatagataaaatatagtattggaattgtttggaggtttggtatagtggtttatgtttgtaattttagtattttgggaggtcgaggtaggtagattatttgaggttaggagtttaagattagtttggttaatatggtgaaattttatttttattgaaaatatataaattagttaggtatggtggtatatatttgtaattttagttattcgggaggttgaggtagaatcgtttgaattcgggaggtggaggttgtagtgagtcgagatcgtgttattgtattttagtttgggtgagagtgaggtttagttttaaaaaaaaaaaaaaaaagtttggtgatagtggtgttgtgtttaaagttatagatttatagaatgtttattgtatatttatattgttttgatatattagagatattttttagaatttaaaataggtttgaggatttaatgatttgtgtattgaagttgtagattagttttttgattggatatttagttattatttttgatttttgttttagatgattaagatttagttgtttgtggtggcgtttttgtttttaggatgtgttaattattattcgattagatatattatttttttgttttaagtattttttattatttatttatcgttttttgttacggtattatatgtttttattagttagttcggagaaggaattttgatgagaatttttgatttaattttgtttgatgtttttgtttttaggtttggaagagtaggagtaaggtagggtttgaaagttgattttaaaaaagatgttttttttatgtagaagttattttgtttttataagtttttagggtttagaatgattttttatggatgttttgaagaatgtggtttgttgaagagtgggtatggattagagttatagattattagtgtaataaagttagaaggtttttttgagtaaatgatttttatttatgttaagatttgtttttgagttcgttgtggttgaaattgaattggtagattggattgttttttttttttttagtgggaattaggtggtttgttattgaagaaaaatttagtaaaagggtatattagtaatggggttaataagggggattaggatttttagatttgttagataatagataatagagttatagaaatgaaagtaattttaagaaaagaagggatttatgataatttttagttgttatagaagggtatgatttattttttttttgatagtattgatttttttaaattttgttttttttgttatttgttagtttagattattaattggagattggttttaatgggaaatttggacgtttattttttgttttgattgttggtaaaggtagttttgtttttttttatggtgttggggtttttaatttttttgtggaattttttgttgtaagagaatggaggagtttagtgagttgggagagggaaatgtaggcgatattgttgaaggattaggtagtgttgggtgttagatgtttgaatgttaggttaaggaatttggattttttttgagatggagttttgttttttttttttaggttggagtgtaatggcgatttcggtttattgtaatttttgttttttaggtttaagtaatttttttgttttagttttcgaagtagttgggattataggtatgtgttattacgttcggcgaattttgtatttttagtggagacggagtttttttatgttggttaggttggttttaaatttttgattttaggtgattcgtttgtttttgttttttaaagtgttgggattataggtgtgagttattgtgttcggttaggaatttggattttattttgtaggtaatagtaaagtttttgaagatgtttttttttttttttttgagacggagtttcgttttgttttttaggttggagtgcgttatttcggtttattgtaagtttcgttttttgcgtttacgttatttttttgttttagttttttgagtagttgggattgtaggcgtttgttattacgtttagttaagtttttgtatttttagtggagatagggttttatcgtgttagttaggatggttttgattttttgatttcgtgattcgttcgtttcggttttttaaagtgttgggattataggcgtgagttattatattcggtattgagggtgtttttttaaagaaaggaaaagatttaaaattggtgttagtatgtaggatgaattggagggaaatgttttttaattttttttatttttttttggtagtttatttttttttattttttttgtatgtgttagtttagtatatgttttttggaaattgattagtatattttaaattaatttagaacgttattaaatttttaaaaaatttgttgttattgggtttgatggtatgaaaatagtttgtttttttttatttttttatagttgagagatttaattatggttttaagaaggaattagaggtagaaagttgttattgagagatttttttttgtgtgtgttttggattattagagtataatatattggttttaaaaggattttagaggtagaatatttttttatttgagatagattttaaatatttagtagttgattgtttattttgtagttagatatttttagaagaggatatttgttttttttttagagttatattttagtgttggtaattttttagtttttttttttgtttaattgaaagttgtgtttatttaaagtgttatttaggagggataagtagaaaatattaagattgtttttaaaataagtttttggttttgaaataagttttaatttattttttaatttttatttgttttgttttttaatttatatgaggtaattttgttttaaaaaatagttttgttttttttagtttataaatttaaaattagtttgaatttgtaaggtaaggaggtttagtttagagttttttgttttacgggagttattaggttgttgtggattggggtttagtattttttttggaattatttattagatttgtggattttaatattattttttataattgttattcgagagattagaagtttgttatttatgtgtttgatagttttgtttttaaatattttttatattattgttatttttttattttttgttttagttttttaatattttttatgaagattattgtaattttttttattggtttttcggtttttggtttttagtttattttttattgtgtttgtaggtttgatttgatttgtaaatttgattgtgttatttttatgtataatttgtgttttttaaagtaaaattaaaattttttttttgatatataggtttttttatgatttggttttttcgttgtttgtagttttattttttgtttttgttttttttatattttgttttaatagtattgagttatttgttattttttgaatatttttatgtgttaaattatttgtttttgtttgattgtttttaaaatttttttattttttagattttttagtttaagtgtaatttttttttttttttgttattgtttttaaagagaataaggttttgttatgttgtttaggttggttttaaattttttggtttaagtagttttgttttagttttttgagtagttaggattataggtatatagtattatgtttggtttattgttttttggaatttttttttgattttttagtagattgaggttttttttttgtattttttttttattttgtatgtgtgtgtgtgagagagatatggtattgtgttgtatttgggtgtttgttttttttttggaaggtgagtttttgagggtaggggttgtttttttatttttttatttttagtgttgaatattgtatatgttaaatggtgagtaggtttatagttatgttaggaatagtgagtaatgatgtgttaggttttttgttaaggtgttgggaatttaattgtgaagtatatagacgtggtttttatttttatagagtttgtaattagtgggaaatatagataagtaaatatggatatggtgttgatggagaattattggtgagaatgggaatataatgtgtatttaattttgtttagtggttttgtaataatattttttttatatattcgtttttttaaagtaggttttataaattattttattttttttttttttttttatttttagttggtgattttgtttttatttttttattaaaaaaaagaagtagataagaatttttttatttttttattattgaattataatagattatttatttttatatttatattttttgattttttatggtggatgatgtgttttttttttgtgaaagttttgtttgtgtagaggatttagtttttttttgtttatttagggatttcgtttttgtaattatttttttgtttcgtgttattaatttttgttttttttttggattatttttattatataaatatgttttaatattgtttatttaaaaaaaattcgtttgattatagataattttttagttattattttattttttttttattattatagaattttttgaaagaataattaatgtttttatttttttttttaattatttattttttaatttatttttggtattggtttgttttcgttattttattgaattattttattgaaattatttttgttatgttgtaacgtttagtatttaatgtaggtattggtttttgtgtaaaaggaaagtttttttttgaatataatatttttttgtttgttttgttttattttattgtttttttttttttgttgttttgtgttgggcgtttttttgattgagagtatggttgtagatatttttattttgtatttttttttaaatagataaatttaaataatatttgtatatttataattatttttttatatttttagttttgaattgtttttcgaattttaaattagtaaatttagttgttaatttgatgtttttatttgatgtttgatatgtattttgaatttaatatgtttaagattaaatttgtttatttagttatttgtttttttattagttagtacgtggtgttaatgttggttgtggttttttttttttttttttttgagatatagttttattttgttatttaggttggagtgtagtggtataatttcggtttattgtaatttttatttttcgggtttaagtaatttttttgttttagttttttgagtagttgggattataggtacgtttttttatgttcggttaatttttgtatttttagtagagacgaggtttcgttatgttggttaggttggttacgaatttttgattttaggtgatttatttatttcggttttttaaagtgttgggattataggcgtgagtcgttatgttcggtcggttgtgtttttaaatgaagaaatttaagttttcggggttttttgattttttttattttttgtatttgttttattagtaagttttgttttttttaaaatatagtttgtatgtttttatttttgtttatttttattattatttttttgagttttttgggttttaagtaatttttttgtttttttttattttttatatttttgagacggagtttcgttttgttgtttaggttggagtgtagtggcgcgatttcggtttattgtaagtttcgtttttcgggtttacgttatttttttgttttagtttttcgagtagttgggattataggtattcgttataatgatcggttaattttttttttttttttgtattttttagtggagatgggttttattatgttagttaggatggtttcgattttttgattttgtgattcgttcgttttggttttttaaagtgttgggattataggtgtgagttattgcgtttggtttatttttatttttatttttatttttttgagacgtagttttattgtgtcgttaggttggagtgtagtggcgcgattttagtttattgtaattttcgtttttggagtttaagcgatttttttgttttagtttttttagtagttgggattttaggagtttgttattgtattcggttaattttttgtattttatttttagtagagatggggttttatttttttgattaggttggttttgaatttttgattttgtgatttatttatttcggttttttaaagtgttgggattataggcgtgagttattgcgttcggttttttgtttttttttaattttgcgaattattatattgttttatcgtttttataattgaatttatattgttttttgaggtttattatgttttttaggatttggtttttgtgtttttttttttgattattatagttttgttggtttgtttttgatttttttttttttttttttttttttttgagatggagttttgtttttgttgtttaggttggagtgtaatggtacgatttcggtttattgtaattttcgtttttcgggtttaagcggtttttttgttttagttttttgagtagttgggattgtaggtatgtattattaagtttggttaattgttttgtatttttagtagagacggggtttttttatgttggttaggttggtttcgaattttcgattttaggttatttattcgtttcgattttttaaagtgttgggattacgggtgtgagttattatgtttggcgtttgtttttgtgtttataatatgttaagattgtttttattgtttagaatgttttgtttttagatttttatatggttggttttttattttttaaatattggttttaaatagtaagtttttaaagagattttttgttatgattgaatttaagaaaagttttttagttattttttattattttgttttattttttttatagtatatatttttatttagtagtttttggtttatttgttaatttattgattatatgtttttttttataggagtgtaagttttttgagagttagattgttttgttttgtgttatatttttagtatttgaaatgatgtttgttatgtagtagatgtttagtaaatattttatggaataaatggatatttaaggggatagagtaaattagaattgttaaaatggaatagattgtttgaagaggtagtaaatttttatttttggaagtgtttagggagagattgaaggattattggtagtggagtattttgaataggtttttttttttgttttttttgtttttaatgtatttgagagatgtgatatttttattagtaatataggttttggaaagttgataattttttatttggaggtggtttattagattttgtaagtggtgagtatattttggaaagttttttacgtgattagtacgtttttttaagtatggttattttttattattttttgggtattgtatatattaaatggggtgttggtgtttatgatttttgaggttttttttaattttgtgggattttgatttatatgtttttattgaaataatttggttattatgattataataataataatattaatttattattttatttatttttatggataattttttttttttttttttatatttttttaaaatttaatatcgtgttttttattttaatgattattattaatagttttttatttttttagatttttttttagattttaattgaaatgataagataattatgtatattattatatgtaaataaaatattttattttttttttgagacggttttgatttgttttttaggttagagtgcggtggtatgattgtggtttattgtagtttgtaatttttattttttgggtttaagtaatttttttattttagtttttcgagtagttggggttataggtgtgtgttattatatttggttaattaaaatattttttttgtagagatagggtttttttattttttttaggttggttttaagtttttgggtttaagcgatttttttattttggttttataatatgttggggttatagttgtgagttattatgttttggttaagtgaaattaggaatgggttgggtgtgggggtttatgtttgtaatttttatttttaggtaagtagaggcgggaggattgttgggtaatatagggagattttgtttttattaaaaataaataaaaaaattagttaggtatggtggtgtatgattgttgttttagttatttagggggttgaggtgggaggattgtttgagtttaggaggtcgaggttgtagggagttatgattgtattattgtattttagtttgggcgatggagtgagattttgttttaaaaaaaaaaaaaaaaaaaggattggtttttttttatttaataagttttagatatgtttgttgttaatgtatagagaatttattttatttttttgaataattgtatgggattttattgtatgttagttgtatagtttaatttttttgatgtttagattgttttaattttttttttaattttataaatatatttttagaatgtttttgttttgtaagataaatttttttgttaaaaggtaaaattattttaaatattaatggatattgttagttgtttttttaagtggatgaatgaatttgtattttttatagtaggggtttatattggttatttttgttttagttattgtttttaatatttttaagggtttggatatttgaaaggattaatggtgtttttatggtgtttatatgtttaagtataatgaaaattgttgttatggtgataggttttggagaattagtttgatagttttttggtttttggattagatttgtttgttgtttttttttagttaatgatgggatgatgttagtttgaagcgagtttaggtttttttaagtaatgtaataatttattataggtataaagatatttcggaagagtgtatttttggaattgtttgtttttttttttttgttaatggtgattgttagaatttttaaggggatggagtgtggtagtggagagtttttatgaattattttttttaggttttttgttttttttgagataaataagtagttgttagaatttcgagattaaagatagtttatcgagaattgtgaggtttttaagaatgagcgtgttatttttataaattttgttatttattaaatgaatattttattagaaaataatttatatttttataattttttattatttagttcggattttttgttgttgttttaagtgtatttttatttaggtataattagaaatttttaaattagtagataagagagttttgtgggttttttggttatatatttttttttttgagaaagtttttaggttttagtgtaattttgagaagtaatatttttttttttttaatagagtgcgaaatttaattgtataatttgataaatttttaaatgtatttgtttaattattatttagattaagatgtaggatattattagtattatagatgtttttttgtatttttttagttattttttttttgtgaaagataaaaattattattttgttatagattggttttattaagttttaagttttttgtatatggaattatatagtatatatttttttgttttgttttgttttgagacggagttttttttgtttaggttggagtgtagtggcgtaatttcggtttattgtaatttttattttttgagtttaagtaaatttttttgttttagttttttgagtagttgggattataggtgcgtgttattatgtttagttaatttttgtagtttttattagagatggggtttttttatgttggttaggttggttttgaatttttgattttaggtgatttatttattttggttttttaaagtgcggggattataggagtgagttatcgtgtttggtttttgttttattttttaatttttttttttttagatggagtttcgtttttgttgtttatgttagagtgtaatggtacgattttggtttatttttatttttatttttattaatttttttgttttattgttttagtttgttaagtaattgggattataggtatgcgttattatgttcggttaattttgtatttttagtagataaggggtttttttatgttggttaggttggttttgaattttcgattttaggtgattcgtttgtttcggttttttaaagtgttgggattataggcgtgagttatcgtgttcggttttttttttgtttgtttttggttaagataaaatatgataaaatttattattttaattatttttaagtgtatagttttgtggtattaagtatatgtatattgttgtaaaattattattattatttatatttagaatttttttgtttttcgtaattgaaatttagtttttattaaatagtaattttttatttttttttttgttagtttttggtatttattattttattttttgtttttaggagtttgattatttttgatgttatataagtgaaattatatggtatttgtttttttgttatggtttatgttatttaaaataatgtttttaagatttagttatgttgtagtaggtattagaatttttttttttttaaggttgagtattttattgtatgtatatattatattttgtttattcgtttttttgttgatatttgggttgtttttattttttggttattgtgattaatgttgttatgaatatgggtatgtaaatattgtttgagagtttggttttattttttatttttttaattttttagatggagttttttttttgttatttaggttggagtgggacggagtgatgtcggtttattgtagtttttattttttgggtttaagcgatttttttgttttagtttttttagtagttgggattataggcgtttattattacgtttagttaatttttgtatttttagtagagacggggttttattatgttggttaggttggtttcgaatttttgatttcgggtgattcgtttggtttagttttttaaagtgttgggattgtaggtgtgaattattgtgtttggtcgagattttgtttttattttttttggatatgtatttagaagtggaattgttggattatatgatatggtaattttgtttttaatttttttgaggaaacgtagtattgttttttatattggttattttatttgatttttttatttgttagtgtataagggttttagtttttttgtatttttgttaatttttgtttttttgatattagatattttaatagatgtgaggtgatatttcgttgtaattttgatttgtattgttttagtgattaatgatgttgagtatttttttatatgtttgttggttatttttatattttttttggggaaatgtttatttaagttttttgtttattttaaaatttggttattattttgttgttaattgtattgtaggggtattttaatatattttgatattaattttttattagataagtgatttgtaaatatttttttttatttcgtaggtgtttttttattgttgtgttttttattgtatttttattatagaagttttaaattttgatatagtttaatttatttatttttattttgttgattatatttttggtgttatatttaataaattattgttaaatttaatgttataaaatttttgttttgtttttttttaagagttttttagtttttggtttttatttatttcggatttaggtttttgattcgtttcgagttaatttttgtagtatatggtataaggtaagggtttagttttatttttttgtttatggatatttagtttttttagtatcgttggttgagaagattgtttttttattgagtggttttgttagtttggttgaaaattatttgattttgtatacgagggtttttgtgtgttttttaaaaaataaagtaattaaattgatttattttttaattgtagtaaatgtatttttaaaataaatttataatggaaaatttgaattattatttttaaatagaaggttatattaaaaatattatggagttaggtagatgtgtttattcgtgtttgtggttttagttgtttaggaggttgaggtgggaggatcgtttgggttttagttcggtttgggtagtattattagattttgttttttgtcgagtttttagtggttttgtgtggttgtattttagaatattttttatttaattgagggggtatatttgtttttttagtatatatatttaggttttgttttgtggtttttgtgtgggagttgggtttttttgtttttggttttttttgggtatttgttaggttttagttggtttggttagttagtgtgtattttttaagttttgttcgggtacggtggtttatgtttgtaattttagtattttgggaagtcgaggtaggtggattataaggttaggagttcgagattagtttggttagtatggtgaaatttcgtttttattaaaaatataaaaaattagtcgggtatggtggcgtatgtttgtagtttcggttatttgggaggttgaggtaggagaattgtttgaatttagtaggtggagattgtagtgagtcgagattatgttattgtattttagtttgggtgacggagcgagattttgttttcgattttttaaaaaataaagtttttgattgtgttgtttaatttatttgtgtaatttatttatttttgtgtatagtagaagtttttttttattgtagtataatattttattgtttgtatatgttataatttatttattttattgttgatagatattagattgtttttagtttggggttatttgggtattatttttgtgtatgttttttgatgtatatatgtatttatttttgttagagtagaattgttgggttttcgggtatgtttgtgtttattagtatatttattttatatttttatataattatttttttgtgttttgttttttgtgtagt

SEQ ID NO: 18 - DNA, 18997 bp, Artificial Sequence
  chemically treated genomic DNA (Homo sapiens)
attgtataagaagtaaaatataaaaaaatgattatatagaagtataaaataaatatgttaatgaatatagatatattcgaggatttaataattttattttaatagaaatgaatgtatatatatattaaagggtatatatagaaatgatatttagatagttttaaattggaaataatttaatgtttattaatagtaaaatggataaattatagtatatataaataatagaatattatattgtaatgaaaaagaatttttgttatatataaaaatggatgaattgtataagtaagttgggtaatataattaaaaattttattttttggggagtcggggatagagtttcgtttcgttatttaggttggaatgtagtggtatgatttcggtttattgtaatttttatttgttgggtttaagtaatttttttgttttagttttttaagtagtcgggattataggtatgcgttattatgttcggttaattttttgtatttttagtagagacggggttttattatgttgattaggttggtttcgaatttttgattttgtgatttatttgtttcggttttttaaagtgttgggattataggtatgagttatcgtgttcggataaaatttaaaaaatatatattggttggttaaattagttggaatttggtaggtatttagaggaagttaaagataaaaaagtttagtttttatatagagattatagggtagagtttaagtgtatatgttgggggaataaatgtatttttttaattagatgaggaatattttgggatgtagttatatagagttattgagaattcggtaggagatagggtttggtggtgttgtttaggtcggattggaatttaagcgatttttttattttagttttttgagtagttgggattataggtacgggtgaatatatttgtttagttttatggtatttttagtgtgattttttatttagggataatgatttaggttttttattataagtttattttaaaaatatatttattatagttaaaaaatgaattaatttaattgttttgttttttaagaaatatataaaaattttcgtatataaaattaaatgatttttaattaaattgataaaattatttaatggggaaatagtttttttaattaacgatgttgggaaaattggatatttataggtaaaagaatgaagttggatttttattttatattatatattataaaaattaattcgaaacggattaaagatttaaattcgaaatggataaagattaaaaattaaaaaatttttagaagaaaatagagtaaaagttttatggtattggatttagtaatgatttattggatatgatattaaaagtatagttaataaagtaaaaatagataaattggattatattaaagtttaaaatttttgtgataaaggtataataaagggtataatagtgaaaaggtatttacggaatggggaaaaatatttgtaaattatttatttgataaagggttaatattagaatatattaaagtatttttataatgtaattaataataaaataataattagattttaaaatgggtaaaggatttgaatagatatttttttaaagaagatataggaatggttaataagtatatgaaaagatgtttaatattattaattattagggtaatataaattaaaattataacgagatattattttatatttattaggatgtttagtattaaaaaaataagagttggtaagaatgtagagaaattgaaatttttgtgtattaataagtgggaaaattaaatagggtagttagtgtgaaaaatagtattgcgtttttttaaaaaaattaaaaatagaattgttatattatataatttagtaattttatttttgggtatatatttaaaagaagtgaaagtaggatttcggttaggtatagtggtttatatttgtaattttagtattttgggaggttgaattaggcggattattcgaggttaggagttcgagattagtttggttaatatggtgaaatttcgtttttattaaaaatataaaaattagttgggcgtggtggtaggcgtttgtaattttagttattagggaagttgaggtagaagaatcgtttgaatttaggaggtggaggttgtagtgagtcgatattatttcgttttattttagtttaggtgataagagagaaattttatttgggaggttgggagggtgggggatggaattaggtttttaagtaatatttgtatatttatgtttatagtagtattagttataatagttaaaaggtgagagtagtttaagtgttagtagaagaacggataagtaaagtgtgatgtatatatataatggaatatttagttttaaaaggaaggaaattttgatatttgttataatatggttgaattttgaggatattattttaagtgatataagttatgataaagggataaatattatgtggttttatttatatgatattaagagtagttaaatttttagaaatagaaagtggaatggtagatgttagggattgatagagaggaggatgaggagttattgtttaatgggaattgaattttagttgcggaagataaaaaagttttggatatggatagtgatgatgattttataataatgtatatgtatttaatgttatagaattatatatttaaaaatggttaaaatggtaaattttgttatgttttattttgattaaaaataaataaaaaaaaggtcgggtacggtggtttacgtttgtaattttagtattttgggaggtcgaggtaggcggattatttgaggtcgggagtttaagattagtttgattaatatggagaaattttttgtttattaaaaatataaaattagtcgggtatggtggcgtatgtttgtgattttagttgtttggtaggttgaggtaatgaggtaggagaattggtggaggtggaggtggaggtgagttaagatcgtgttattgtattttagtatgggtaataagagcgaaattttatttaaaaaaaaaaaaattaaaaaataaaataagggttaggtacggtggtttatttttgtaattttcgtattttgggaggttaaggtgggtggattatttaaggttaggagtttaagattagtttggttaatatggggaaattttatttttaataaaaattatagaaattagttgggtatggtggtacgtatttgtaattttagttatttaggaggttgaggtaggagaatttgtttaaatttaggaggtggaggttgtagtgagtcgagattgcgttattgtattttagtttgggtaagagagatttcgttttaaaataaaataaaataaaaaagtatatgttatatgattttatgtataaaaagtttaaaatttggtaaaattaatttatggtaagatagtggtttttattttttatagggagaggataattgggaagatgtaaggaggtatttatggtgttggtaatgttttgtattttgatttggatagtggttagataggtatatttaaaaatttattaagttgtataattaaatttcgtattttgttaaaggaaaaaaaatattattttttagagttatattgaaatttagaggtttttttagagaaaaaaatatataattaaaaaatttataaagtttttttatttgttgatttaaaggtttttaattatatttagatggggatgtatttgaggtaataataaagggttcgggttgaatgataaaaagttataaaaatgtgaattattttttaatagaatatttatttaatgggtagtagagtttataaagatagtacgtttatttttgagaattttatagttttcgataaattatttttgatttcgaagttttagtagttgtttatttgttttaaaaaaggtagaagatttaagagagataatttatgagaattttttattgttatattttatttttttgaagattttaatagttattattgataaaaaaaaaaaaataggtagttttaggaatatattttttcgaagtatttttatgtttgtgataaattattatattgtttaagaaaatttaaattcgttttaggttagtattattttattattaattaagaaaaagtaataaataaatttaatttaaaggttagaaaattattagattagttttttagagtttgttattatggtaatagtttttattatgtttaaatatgtaaatattatggaagtattattgatttttttaggtatttagatttttaaaaatattaaagataatgattgaagtaagggtaattagtgtaaatttttgttgtagaaagtatagatttatttatttatttgggagagtaattagtaatatttattaatatttaaaatgattttattttttgataaaggaatttattttatagaataaagatattttgaaagtatgtttgtaaagttgaaaaaaaaattaaaatagtttaaatattaaggggattaaattatataattgatatgtaatgaaattttatgtaattatttaaaagaataaggtaaattttttgtatattgatagtaaatatatttaagatttattaagtgaaaaaaagttaattttttttttttttttttttttgagatagggttttattttatcgtttaggttggagtgtagtggtgtaattatggttttttgtagtttcgattttttgggtttaaataatttttttattttagttttttgagtagttgagataatagttatgtattattatgtttagttaatttttttgtttgtttttggtaaagataaggtttttttatgttgtttagtaattttttcgtttttgtttgtttaagggtagggattatagatatgagtttttatatttagtttatttttaattttatttggttagggtatggtggtttataattgtaattttagtatgttgtgaaattaaggtgggaggatcgtttgagtttaagagtttgagattagtttgggaaagatagggagattttgtttttataaaaaaaatgttttaattagttaggtgtggtagtatatatttatggttttagttattcgggaggttgagatgggaagattgtttgagtttaggaggtagaggttgtaggttgtagtgagttatagttatgttatcgtattttggtttgggagataaattaagatcgttttaaaaaaaaagtaaaatattttatttatatataatgatatatataattattttgttattttagttagaatttagaaaaaaatttgaagaaatagaaaattattaatagtggttattggagtaaagaatacggtgttgagttttgaggaaatatgagggaaaaaaagaaaaattatttatgaaggtggataaggtaataaattgatgttattattattgtgattatggtaattagattattttaatgaaaatatatgaattagagttttataaagttggaaaggattttagaggttataaatattaatattttatttgatgtatataatgtttaagaggtggtagggggtggttatgtttggggaggcgtattaattacgtgggaagttttttaaagtatatttattatttatagaatttggtaagttatttttagatggagaattattaattttttagagtttgtgttattgataaggatattatattttttagatgtattggaaataaaaaaggtaaaaaaaaaagtttgtttaaaatgttttattattaatgattttttagtttttttttgggtatttttaaagatggaaatttattatttttttaagtagtttgttttattttagtaattttgatttattttatttttttaaatgtttatttattttataaaatatttattaaatatttattatatgataagtattattttaggtgttaggaatatggtatagaataaaatagtttggtttttaaggaatttatatttttatggagagaaatatataattaataagttaataaataaattaggaattattaggtagagatatgtattatgaagaaaataaaataggataataaagagtgattgggaagttttttttaaatttaattataatagaaggtttttttaagagtttgttatttaagattaatatttgaaagataaggaattaattatgtaaaaatttgggggtagagtattttagatagtaagaataattttgatatgttataaatataaggatagacgttaggtatggtggtttatattcgtaattttagtattttgggaggtcgaggcgggtggataatttgaggtcgggagttcgagattagtttgattaatatggagaaatttcgtttttattaaaaatataaaataattagttaggtttggtggtgtatgtttgtaattttagttatttaggaggttgaggtagaagaatcgtttgaattcgggaggcggaagttgtagtaagtcgagatcgtgttattgtattttagtttgggtaataagagtaaaattttattttaaaaaaaaaaaaaaaaaaaaaaaaaaattaaggatagattaataagattatagtgattaaggggaaggatataagggttaaattttgaggggtatggtaagttttagaaaatagtatggatttagttataagagcggtggaatagtataatggttcgtaaggttaaaaagaggtagaaggtcgggcgtagtggtttacgtttgtaattttagtattttgggaggtcgaggtgggtggattataaggttaggaatttaagattagtttggttaagaaggtgaaattttatttttattaaaaataaaatataaaaaattagtcgggtgtagtggtaggtttttggaattttagttattagggaggttgaggtagaagaatcgtttgaattttaagggcggaggttgtagtgagttgagatcgcgttattgtattttagtttggcgatatagtgagattgcgttttaaaaaaataaaaataaaaataaaaataggttaggcgtagtggtttatatttgtaattttagtattttgggaagttaaggcgggcggattataaggttaggagatcgagattattttggttaatatggtgagatttatttttattaaaaaatataaaaaaaaaaaaaaaattagtcggttattgtggcgggtgtttgtagttttagttattcgggaggttgaggtaggagaatggcgtgaattcgggaggcggagtttgtagtgagtcgaaatcgcgttattgtattttagtttgggtaatagagcgagatttcgttttaaaaatataaaaaataaaaagaagtagaagaattatttaggatttaaagagtttaggggaatggtagtaaaaatggatagaaataaagatatataggttatattttggagaagatagagtttgttgatgaaatagatgtaggagataagagaaattaagggatttcggaaatttaaatttttttatttaaaaatataatcggtcgggtatggcggtttacgtttgtaattttagtattttgggaggtcgaggtgggtgaattatttgaggttaggagttcgtgattagtttggttaatatggcgaaatttcgtttttattaaaaatataaaaattagtcgggtatgggggagcgtgtttgtaattttagttatttaggaggttgaggtaggagaattgtttaaattcgggagatggaggttgtagtgagtcgagattgtgttattgtattttagtttgggtgatagagtgagattatgttttaaaaaaaaaaaaaaaaaaaattataattaatattgatattacgtattaattggtgaagaggtagatggttggatgagtaggtttgattttggatatgttaagtttaaggtatatattagatattaagtgaagatattaagttggtaattggatttattaatttggaattcgggggatagtttaaaattaaaaatataaaggagtagttgtaggtatataggtgttatttaagtttatttatttaaaaaaaaatataaagtgaaggtatttataattatgtttttagttagagaagcgtttagtataaaatagtagaaaggaaaaagtagtgaggtgagatagaataagtaggagagtgttgtatttaagaaaaaattttttttttatatagaagttaatatttatattaaatgttaaacgttgtaatatggtaagagtagttttagtgaagtaatttagtgaagtagcgaggatagattaatattaagagtgggttaaggaatgaatagttaagggaggaagtaggaatattaattatttttttaagaaattttgtaatgatggaaaggaaatgggatggtagttagaagattatttgtggttaaacggattttttttaaatagataatattagaatatgtttgtatgatgggaatgatttaggagagaaatagaaattaatgatacggaatagaggaataattgtagaagcggagtttttgagtgagtaagggaagattggattttttgtataagtagagtttttataggaaagagatatattatttattatgagaagttagagagtatgggtataaaagtaggtgatttgttatgatttagtggtgaaaagatgaaggaatttttatttattttttttttttagtgaaaaaataaaagtaagattattaattaagaataaaggaaaagaggaaaaatagagtgatttatgaagtttattttaggaaggcgaatgtataagagaaatattattgtaggattattaggtagggttggatgtatattgtgtttttatttttattaataattttttattagtattatatttatatttatttgtttgtattttttattaattataaattttgtgagagtagaagttacgtttgtgtgttttatagttgaatttttagtattttggtagagaatttagtatattattgtttattatttttgatatgattataggtttgtttattatttaatatatatagtgtttagtattgaggatggagagatgagaagatagtttttgtttttaagggtttattttttagagagaaggtagatatttaaatatagtataatgttatattttttttatatatatatatataaggtgaaaaaggaatatagaggaaagattttaatttgttggagagttagggaagggttttaaagggtaataagttaggtatagtgttgtgtgtttatagttttagttatttaggaggttgaggtaggattgtttgagttaaggagtttgaggttagtttgggtaatatagtaagattttgttttttttaaaaatagtaataaaaaaaaaaggaaattgtatttgagttgagaagtttaaaaagtgaaggaattttgaaggtagttaagtaaaggtaaatagtttgatatatgagagtgtttagagaatgataagtagtttaatattgttggagtagagtatagaggaggtagaggtaagagatgaagttgtagatagcgaggaagttagattatgaaagagtttgtatgttaaaaaaaaagttttaattttattttgggaaatataaattgtatatgggagtgatataattagatttgtaagttaaattaagtttgtaaatatagtagaagatggattggaaattagaggtcggaaggttagtaaggaggattatagtagtttttataagagatattgagaggttaaaatagaggatgaaaaagtagtaatgatatgaaagatatttagaaataagattattaggtatatgggtggtaaatttttaatttttcggataatagttatgagagataatattaggatttatagatttgatggataattttaaaagaaatgttggattttagtttataatagtttaatagttttcgtgagatagaaaattttggattaggtttttttgttttatagatttaaattggttttgaatttgtaaattaggaaaaataaaattattttttaagataaaattattttatatagattagagaatagaatagatgaaagttgggaaatgaattaaaatttgttttaagattaaagatttattttgaggatagttttaatgttttttatttattttttttaaatagtattttaaatgagtatagtttttagttgggtaaaaaaggaaattaaagggttgttaatattggaatataattttaaaaaagggatagatgtttttttttagagatatttaattataagataaatagttagttattggatgtttgaaatttgttttaaatagaaaaatattttatttttgaggtttttttaaagttaatatattatattttgatgatttaaaatatatataaaaaaagattttttaatgataattttttatttttggtttttttttgaaattatggttaagttttttagttatgagggaatagaagaaaatagattatttttatattattaggtttaataataataggttttttaaaggtttggtagcgttttgaattggtttaaaatgtattggttaatttttaaagagtatatgttaaattaatatatgtagagggaatagaagagaatagattgttaaaaaaaaatagagaagattaaagaatatttttttttaatttattttatatgttaatattaattttaaatttttttttttttttaaaaaagtatttttagtgtcgggtgtggtggtttacgtttgtaattttaatattttaggaggtcgaggcgggcgaattacgaggttaggagattaagattattttggttaatacgatgaaattttgtttttattaaaaatataaaaatttagttggacgtggtggtaggcgtttgtagttttagttatttaggaggttgaggtaggagaatggcgtgaacgtaggaggcggagtttgtagtgagtcgagatggcgtattttagtttgggggatagagcgagatttcgttttaaaaaaaaaaaaaaaagtatttttagaagttttattattatttataggataaagtttaaatttttggtcgggtatagtgatttatatttgtaattttagtattttgggaggtagaggtaggcggattatttgaggttaggagtttgagattagtttgattaatatggagaaatttcgtttttattaaaaatataaaattcgtcgggcgtggtggtatatgtttgtaattttagttatttcggaggttgaggtaggagaattgtttaaatttgggagatagaggttgtagtgaatcgagatcgttattgtattttagtttgagaaaaaagagtaaaattttattttaaaaaaagtttaaattttttggtttggtatttaaatatttagtatttagtattatttaattttttaatagtatcgtttatattttttttttttagtttattggatttttttatttttttgtaataggaaattttataggaaagttagaaattttagtattataaaaaggaataaggttatttttgttaataattaaaataaaggataagcgtttaaattttttattaaaattagtttttagttgatgatttaggttaataaatggtagaagaggtaggatttaggaaagttaatgttgttaaaagaagggtaaattatatttttttgtggtaattaagaattattatgaattttttttttttttgaagttgtttttatttttatagttttattatttgttatttaatagatttggaaattttaattttttttattggttttattattaatatgtttttttattaggtttttttttaatgataagttatttagtttttattggagaggagaaaggtagtttagtttgttaatttaattttagttataacgggtttaaaaataggttttggtataagtgaaagttatttgtttaaaaaaattttttggttttattatattgataatttataattttagtttatgtttattttttagtaaattatattttttaaagtatttatgaaaaattattttagattttagaggtttatgaaggtagggtgatttttatatggagaaggtattttttttaaaattagtttttagattttgttttgtttttatttttttagatttggaaataaaaatattaaataaaattaaattaaaagtttttattaaggtttttttttcgggttggttaataaaaatatatagtatcgtggtagagggcggtgggtgggtggtggagaatatttagagtaaaggggtagtgtatttggtcggatgatggttaatatattttgaaggtaaggacgttattatagataattaggttttggttatttaggataaaagttaaagatggtaattaaatatttaattaaaaggttaatttgtaattttagtatataagttattagatttttagatttgttttaaattttaagaaatatttttggtgtgttagaataatgtaaatgtataataagtattttataggtttgtaattttaagtatagtattattgttattagattttttttttttttttttgaggttgagttttatttttatttaagttgaagtgtaatggtacgatttcggtttattataatttttatttttcgggtttaagcgattttgttttagtttttcgagtagttgggattataggtgtgtgttattatgtttggttaatttatgtatttttagtagagatggggttttattatgttggttaggttggttttgaatttttgattttaagtgatttgtttatttcggttttttaaagtattgggattataggtatgagttattgtgttaggtttttagataattttaatgttgtattttgtttgtattttaattagattataaattttttacggataaagaatatgtgttaaagtttttattataatgttttatattggattgaaaatataattgatgatttgattgatgattatattgaaaagaaattatgaatgttggtatgtttttaaagttaaagtagtaggtgatattagtgatagaggttacgtttgtttttagtatttattgaattttcgttgggtaagaaaagttagattttaataaaaattgatggagattgttttcgttaaatatagtagtttataaggttattaaattttggaattaaaaggaaaaataaggttaaaatagagttatgtgaataaaaattgggtttaggatagtgaaataatagtttttttaataagaaaaaaagtagtagtagttaaaaggtaaaattaagtaaaggatgatttaataagaaaagtattagtatttatattttttgtatttttattgaaacgttttatcggagattggtaatgattaggttaagatgatagagatgatttaaggttgggttttttatttgaaaagtttattaattttagagttgtgttaaatttaagttaaagttggaatagggtttttttcggattaatattaagtgaagtggattattaagtggagtagcggtacgaaggtggtttttttagatttttaagtttaatttttacggagtcgtttggtattaggtatataatttaagttttttgagttttaatttttttatttataataaaagggtaatgtaggttttttttataattttaaggggcggtggtttgatatagagtattatgaaaataaaagtagtatattaaagtaatatattattattatgattatttatagaattattattcgttaggatgaaattttttatataagagatgaagttcgagagaaaagagttgaaggggaaggtttttacgaggagatagtaatcgaattgtagcgtttcggttagtagtatatatagtaggtacgcgtttagtaattttagacgttgcggagtggagtttaagtatttttttaagaatcgcgaaatgatagatattatcgacgtcgatataattgtacgtaaggtattttagttcgcgttttaaatttttggaggattcgtcgattatatcggatgtgttgtttgcgtatgcgtattttcgtgatttaatttcgtttttttcggtgtgttaatttgcgtaggcgttgaggtcggttagggcgcgtaataattaatgcgtagacgcggattgtattaatagatttaattataatttagaaaagttaatgcgtttgcgtaatggttttattaatgagttggggacgtgtattttttttgttttgttttcgttcgttagttcggtgacgtttatagttgttttggtaataagatatattgggaggaagaggggaataagttttattggggatcgcgtagttaattagaggtattcggttttttttggtttttttgagttttggaagatttaacggtttgtatttattttgaggtaatgtttggcgtttttggggtttgatattagtttgattttaattttgttaagggcgttgtttgtagatgtttgttatagattattggaataagttaagtttattcgtagtgagattcggcgcggttaattattgtataggttttagtttagatttaattatttgggggagtgagtgggtgtggtgaggggcgggaggtagggaggaagtttgattttagtagggttttgaattggaattcgggatttggttttgtaatgttaatatttattgggcgtttttttggggtttgacgttgtattaatttgtagggatttttacgtgaattagatatatttgtagttttaaaagagttggtgaagggagggatagttgtcgaatgtcgtgtaaaaagtatatggttaagtttagtagtttttttttcgtaagttggtattttgaatttggtgtaatatttcgggatgttagcgtcgaaaggttcgaaagagtatgtttggtttaattttattttttttaatttattttgtagaagaaattgaaatggttttaggttttgtattttaataagtgggattattttgagggttttaattgtttttttttttttttttttgagacggagttttgttttgtcggttaggttggagtgtagtgtcgcgatttcggtttattgtaattttcgtttttttagtagttgggattataggtacgcgttattacgttcggttaatttttgtatttttagtagagacggagttttattattgttagttaggttggtttcgaatttttgattttgtgattcgttagtttcggttttttaaagtgttgggattataggtatgagttattgtattcggtttgttttaattttttttaagaaattaagttttggttttcgttgtttttttaattttacgtgaattcgattttttagatttagtttattttattttttagttgtaagtttttttatatatgattaggtattttatttttagttttttaatattttgaattgtacgtgagtaaaatttttaaaatagtaggtgaataatagcgtttttgtttttttattttttttttttttttttttgagatgaagttttgtttttgttatttaggttggagtgtagtgaatggtgcgatttcggtttattgtaatttttattttttgggtttaagttatttttttgttttagtttttcgagtagttgggattagaggtatttgttattacgttcggttaatttttgtatttttagtagaaacggggtttcgttatgttggttaagttgattttgaatttttgattttaggtgatttgtttgttttagttttttaaagtgttgggattataggagtgagttattgcgtcggtttttttttattttttatttgtttttagattggaaattttatacgtattaattaacggatgtattattagtggtgattaaagttttatttaagttttagaaagaagagaaataatttaagaaatttttagagtttatttgaatagatagatttatatttatattcgtggagatttgtgtagttatatgaatataagtttagtttaaatttatgttgttgagaaagaaaaaaaaagagtggataataagttggtttttattttaatataatatggtaggaagtattaatttttttgataagttgaatttttttttttgttttattaataagtaggagggtagtttttttacgaatatttaattttaaattttataggttaggttgatgttttttaattatttaggtgtggattttttagggagtttttgttttattagttaggttttttttagtgtttttttttttatgttttgtttgtttttgatttatgttaattattattattaagatttttttaggaatttttataggagagaagaagagatgaaaaatattaaatggatttattgaatgtatttgtttttgagatttgttagttatattaatatattatattagggtttttttgaattatttaaaatagtaagaaaaggtttatttttttatttagtttatgattttataattattgaaatatttttaattgatttgttaataggaaattgttaatattagtgttgattttaattagtttaaattagaatattaatatagtttaaaatttttgtttagagtagtggataagagtgtaagttttagaattagatagttttaggtttgaattttgattttgttgtttattagttgtttaatttggaataagttatttagtttgatagttttattttttttttttataaaatagaaataataatatttggtttattgaaattatgtgaggattaaatgagataatgttaagtattaagttgttagtatagtgtttggtagatagtaaatgtttagtaaatgtttgtttttattaattattattaattttagtaattaattatgtttgttttttttagttttttgaatgattaaaagttagttaaattatagcgtttttaataatttgggtatgtaaaagatagtattggagggattgtaatttaaatggtttttaaagggtagatttaatttataagttgaaattgaagttagagtatattttaggggttttattatataaaataatggaagagtggaggagtaagagggtttttttaagggtaaagtttatgattttatattatatattttttataaaaagaaattatattatttattaaaagaaatataaattttttaaagtttgagtagataataatttttttaaaggaaattttcgtatggaaaagaatgttttttttatttttttttttttgtattgttacgtttgttttaagatttttttttttgtttttgttaattgttattgtatatataatttttattttttaaattttggttttagtgtgattaaaattttttttttttgttttttaatagaatagataaaataggttattatttttagaaataaaaatttaaggagaattaagttgtaaatagtataaagttaaatttttaaagtattaagtttttgattaagttttagtaaagtagtaaatatttttagtgaatttatatttttttatttttttagtttttgatgaagtggaataattttttagtttttttgtttggttttttttttttttagttgtttgggagttttaaaaaagttttagttttgtttttttgttggtattcgaaagtgagtttattatattgttttttttaagagtagattatttattataatatggggttgaaattattagtgtttgagtaatagtgtgtaatagaattttttgtgataatgtttttgtattgtttagtatagtaattgttagatatatgtggttattgagtatttaaattagttagtgttgtaatttaaatgtaggtttattttttcgttgtttgtagagtttatttaataagagtgagatttggtataaagaaaatgatattttattttaaagttattttaggggaggaagtattggttttttgttttaagggtattattttatttttggagtagaaagagggtgtttttgaaatggggtatggaatgttggtatgaatggtacgaggggaggaagcgagtggttggggggtttgtatattatttttagtgttttatttattggatagtgattgttggtgttttttgtgggtaggattgggttgtaaaagtggttaaaattttttaggtaagagaaagttttgtagtaggtatattttgggttgtagataggttgttgttttttaaggtaatttttcggtgggtgagagtttttttttggagtttttaagtatatagttagatgaatttgttttatagggagtgtttgataaagaggaggtaaaaggttataattgtatttttaaagagttaaggaggaagtgaggagaagggggaaaagaagagagattttttaaaaattattaaattattttttagaaaaatggggatatttggttatagtgtgattaaggaaattttatttggtttttatttaaatttaagtagttatttgtggttagtggttgttattggatagaataatttatgagttattttatttatttttatgtttagttaaagagatatattttgtttatagtttatttaaatggtagtgatatttatttgaaataagaataatttatagttgttaggtttgagttattagtttattagttttatttatttttggaatatttagtgatgatttatagttatagaaagagggtttgtaattttttaaggagtttattttgttcgttgtttagatagagttggtttattaagattgggtaattagaatggagaaagagtaatttatatatagttagttgtgtaggagaacggaattttattattatttaaattagtttttttaagtattcggggattagagtttttaaggataatttggttggggaagttagtgagttacgagttttgatggtcggggatgaaattataaggagttaaagttgtttttttgttttgagtttttgggtggggggcgttgtaagattagatgagttagtttattaatttgagtggtattagttgatttattaagtgtaggggttattaaatat

SEQ ID NO: 19 - DNA, 6274 bp, Artificial Sequence
  chemically treated genomic DNA (Homo sapiens)
ggattatttgagtttgggaagttgaggttgtagtgagttaaggttacgttattgtattttggattgggtaatagagttagattttgttttaaaaaaaagaaaaattttatggttttgtttatattatttatttgattttatatgttgtttattttttttattaaaatttttagtttattaattatagtttttttataattaatatttcgatgtgataatgttttagtttaattattgtggttataatagaatgttataaattgggtgatttataaataaaagaagttgatttaggttgatttagaggttggggagtttaagagtttggtgttagtatttgatgagtgtttttttgttttattataatatgggagagggtattacgtgtgaagagagtttatttttataatatagttatttttataagaattaatttatcgttatgagagttatgtgaatttatttatgaggatagcgggttaagtttttaatatatggatttttcggggatatatttaaattatagtagttagttgtaacgttcgtgttatgttttattttggttttgatgtttgtgtagtttttttaaattgcgtttttgttttttagtgtgttttgtaatgtggaaatgatatattgggtaagaggagttgtagtaaagaggtttttagtgacgtagtgataagttgtggggagagggagtgttgtatagttttgtcgtatgttatagttttttagtgagtttgtgtttttggattgtgaattttatgtttgttttttagtttttttagttttttagatggtatagaattgttggaggggggtggagttgtatattttttttgttttgggtaggttattttttgataaaatattaggttaggtttttggtgaaataattttttttgagggtagattttttattaataatagaatgttttaatttattttaaaatggttttttttttttttttattgttagaagtataatgagattttttttttaatattcgtggtaaggatttagtagagttttaggaggtaatatttttaagtgttttatattattttgtattatgattgggttttgttggagtttttaatttgtagaattgtttatattgagtttttcgtaattttttaattatagggtaaatttttttagtcggtattgggtttttggaggtttttgtttgttggtttttttttttggaggttgtgtttttgtgtttgtttgtttttttaatttggggggtagtggtttgtttaatgattttaattttttgaaagagttaagaagaggtgttaatttttcggtttgtttagttttttatttgttgttagaatggagcgttaatagtgttttttatagtgatatgtaatttttaattttagagatgatgaagtatattaatgataaaggagaaatgttttagtagttttttgttagtatattattttttgaaaaagttgttttttttatattttgtaagagatgggttttaatttagagtttaaggtaaatgattttttttaaggagaaggaataaatagttttagaaattatgaaagtttgtttttaggagtgtttttgaattttagtaggggttatatttattttgtagaaataggtgaggtatgtttttggtataaaattttaatggtatagaaggataaattgaaaaataagtttttttttaaatttttgatttcgagttatttagtttttttttttagaggtaaagttgttattagatttttgtatttttttaatatatatttttagaagagttgttaagtgaatatatgtttaagtgaaaatttattttagaagtgtatttttttaaggaattttagggttggaaggaatttgtgttagtttttaatttataatttttattagtatttattgtttttgtataaaaattttttttaaaaaagttttttttattttgatatagtttattttatttttatttagttttaataatttataaaatatatttttgaaagtttaaaatttgttattatgttttttttttttaattaatttttattttgatttttaagttagagaaaataggtggttaaatgttttttgtttaagatggaatttagaatatttgaagattttagatttttattttgttaaataacgtgttttttttttttttttatagagtatttggttttaggaaatttagagttatattttttatagataagattaaatttttatttaatatatttagaaattttttttaagaggataattatttattagaggaaaaaagttttttatgtatagttggtaaagggatggaattatttgtgttattaaaattgatagacgtttatgagatttattaagggaaatattagagttttagtatatatttgttaatatagtatatatgaaggttttatttataatttttttggttaagtagaaattttggtattatttattttaataaatttttaagatattatgaaatagaattttaggttttgatattattatttgttttaggttttgaagcgttgttggataagaggggtaaaatacggttttgttttggatttaaagttggttttttatattagtaagtatattttggtattttggttatttttttcggttatagtattatattgttataaaaggtagatataagtattaattagtttataggttattagataagtttagtttgattaatgtttaatatagtaattgggttattattgttatttttgtggtggtggtatatatatttagtttttgttcgggttatggtttaggattattttttatagaggttgtgagttagagttttaattgtgtagggttttaattatgttaggttatttattttttttaagaggattttattagtgtttgttcggttatatagttttttatttattaagtaatatagttattagtatattttaggtattagttaaggattataaaattaacgtgaatgttagtttttgtattaaaagtttaaaggagaaatttaaattttatatagatgttttatgaagatgtttagtaaatttatttttttttgttttttggaatttattttagtattgtgttatgtgtgtgtttagtaattttttataaaaagttttgttttttgtgatgttattagattatattgaagaatatataagtcgtattatgaaggttgttgttttatatagttttaacgtagtgagaattgatgtttttatatgttgtttttttgggtatttaaagaaatttttgtatagttttataaattagttgtagtttaaattgatttgtgttgtgatttgtatatataggttatatttttttgatagaaaatatagtttaaaattaaatttgtagtttttgttaagtgaatgtataggattttattgtatttaggttttttattgtaagatttatttttgtttttattttatgttttattgttgtgttttttatttgtttttttttagttttgttttttgtgtttttacggattgtttttagtttaggtgtgtaggaagtatatatatgtttgtagagtttttatggtttttgtatttagggtatgattttaacgtatagtggttgtattgatttgttaaaataaaggaatagattattttttttaatttatagggaagttttaggttgtgcgggtagtgagtagatttgtgtttgtttgcgtttgttttggtgaaaaattttatcgtttaggttgtagggtgcgagatttaggtataaatattttgttggatgaggaggaaagatgtaaggttgtttttttttagagatagtaaagggtaggtttgtagttttatttattttaggattgtgatttttgatagagtcgagagattagggttgttgaattaggtttgaaggttttagtgaatttcgtgaagagaggaggggtttggttgtaatatggatttagaggatatttttattgtaggagaaggaatagtggggatggggtggatttgttaaaggaatatagtttaagtttttgtagtttaaaaaagtttagttttttttggttaaagttttcgcgagtttttttggtattttttttgcgggagttataggggtagtgggatatttagtttttttaaaagtatttttacggttgtttgtgttaagtttttattttaagagttttatttttgcgaagtaatgtgttttatatattggttttaaagtatttatggttggttgtaataaatattaaggaggtttgtttttgtattcggagttgggtgtttttattttagatgatttcgagggtgtttgataagatttgaaggattttcggattttagagtattatttcggacgtttggtatttttgtcgcgcgggtacggcgatttttttagttgttaggttagtttttgattttcgagagggtttcgtagtgttgtaggggaggtggggattcgaataaaggagtagttttttcgtcggtgttattattcgacgttggttttaaggttcggttagtttgtttaaagttggtataagtttgttttgtaaaataaaagaagggaaagggggaaggggattttggtatagatttggttcgatttggatataggttgggtttgtaagttcgcggggatcgggtttagaggggtagtgttgggaacgtttttttcggaaattaattttttagggtattcgttttttttttatgcgtcgttttattttcgtcggagattaggtttcgcgggggttatcgttgtttatcgttttcggcggtcgttggttttgggttttcgttgttggtttttttttttttttttcgtatttttttttttttttgtttttttcgatttttttttcgtcgtttggtttttttttttttcgttttgttttttcgcgtttcggttcgcgcgagttagacgttcgggtagttttcggcgtagcgcggtcgtagtagttttcgtttttcgtacggtgtgagcgttcgacgcggtcgaggcggtcggagtttcgagttagtttcggcggtcgtcgtcgtttagatcggacgataggttatttcgtcggcgttcgttcgagttttcgtttcgtcgttaacgttataattatcgcgtacggttttttgatttcgtttagtattgatcgggagagtcggagcgagtttttcggggagtagcgatgcgatttttcgggacggtcggggtagcgtttttggcgttgttggttgcgttttgttcggcgagtcgggttttggaggaaaagaaaggtaagggcgtgtttcgtcggttttcgcgtcgttttcggatcgcgtttcggatttcgtagttcgtttaatcgcgtatcggcgtatcggttcggcgttcgcgttttcgttcgtttttttttgtttttttgagattagttgcgtcgtcgatcgggatcgcgggaggaacgggacgtttcgtttttcggtcgggagagtttggggcgggcggaggaggagacgcgtgggatatcgggttgtaggttaggcggggaacggtcgtcgggattttcggcgtttcgaatcgtttttaattttttttttttatttttttcgtttagttgcgtaggatcggcgttagtgggcgaaagtcgggtgttggtgggcgtttggggtcggggtttcgtacgtgcgtttcgcgttgtttttttagggcgcgacggggttttggcgcgtattcgaggggcgggcgttgtttattcgtcgagattgtattgtttagggaagttgaggaaggaatttaaaaatatagttttttttcggatttcgcgggataggcggttttttgagaggattttttcgttttcgtttttcgcgtaggttttaaattgaagtcggcgttcgttagtttggtttcggtttttttttaggttttcgcgattttcgttttttagtgtggagtcgtagtttcgatttgggagttgggagaattcgtttattattatttgcggttttcggggaggggtggtgttggcggcggttagttttttcgttggtaaaaggtaggtggggttcgattcgttttttgggcgtagatttcggtcgttcgtttcgttcggtgcgttttcgttttgtttatttaagagtgttttttatttttcggggattttagtttttttttgggcgttcgcgtcgaaagttttaggttttttttcgatggtcgtttcgcggagacgttcgggtttgttttatttgtagtttttcggtcgcgtttgggtttcgcggtggagcgggacgcggttgt

SEQ ID NO: 20 - DNA, 6274 bp, Artificial Sequence
  chemically treated genomic DNA (Homo sapiens)
atagtcgcgtttcgttttatcgcgaagtttaggcgcgatcgaagggttgtaggtggagtagattcggacgttttcgcgaggcggttatcgaaggagagtttggggttttcggcgcgggcgtttaggagggagttggggttttcgggaggtggggggtatttttggataggtaagacgagggcgtatcgggcgaggcgagcggtcggggtttgcgtttaaggggcgggtcggattttatttgttttttgttaacgaggaaattaatcgtcgttagtattattttttttcgggagtcgtaggtggtggtagacgagtttttttagtttttaggtcgaggttgcgattttatattggggaacgaggatcgcggggatttggagaggggtcggggttaggttggcgggcgtcggttttagtttgagatttgcgcggagggcggaggcggggaggtttttttagaaagtcgtttgtttcgcggggttcgaggggaggttgtatttttgggttttttttttagtttttttaaatagtgtagtttcggcgggtgggtagcgttcgtttttcgggtgcgcgttaggatttcgtcgcgttttgggaagatagcgcggggcgtacgtgcgggatttcggttttaggcgtttattagtattcggttttcgtttattgacgtcgattttgcgtagttgggcggggaaagtgagggaagaaagttgggagcggttcggggcgtcggaggtttcggcggtcgtttttcgtttggtttgtagttcggtgttttacgcgttttttttttcgttcgttttagattttttcggtcgaagaacgaaacgtttcgtttttttcgcggtttcggtcggcggcgtagttgattttaaggaaataggaaaggacgggcgggggcgcgggcgtcgagtcggtgcgtcggtgcgcggttgggcgggttgcggggttcggggcgcgattcgggggcggcgcgggagtcggcgagatacgtttttatttttttttttttttagagttcgattcgtcgggtagagcgtagttagtagcgttaggagcgttgtttcggtcgtttcggagggtcgtatcgttgtttttcgaagagttcgtttcggttttttcgattaatattggacggagttagggggtcgtgcgcggtggttgtggcgttggcggcgaggcggggattcgggcggacgtcgacgaggtggtttgtcgttcggtttgggcggcggcggtcgtcggggttagttcgggatttcggtcgtttcggtcgcgtcgggcgtttatatcgtgcggggggcggaggttgttgcggtcgcgttgcgtcgggggttgttcggacgtttagttcgcgcgggtcgaggcgcggggaggtagggcgggaggaggagggattaggcggcggaggagggatcgggaggagtagaggaggaggagaatgcgaggaggagggaggagaattagtagcggggatttaaggttagcggtcgtcggaggcggtggatagcggtggttttcgcgggatttagttttcggcgggagtggggcggcgtatgggaggggagcgggtgttttgaggagttaattttcgagaggggcgtttttagtattgtttttttggattcggttttcgcggatttgtaggtttagtttatgtttaggtcgagttaaatttgtgttagggtttttttttttttttttttttttttgttttataaagtaaatttgtattagttttagatagattggtcgagttttagagttagcgtcggataatggtatcgacggggaaattgtttttttattcgggtttttattttttttgtagtattacgggattttttcggggattagaggttggtttggtagttgaggaggtcgtcgtgttcgcgcggtaggggtgttaggcgttcgaggtggtgttttaaagttcgagggttttttagattttgttaagtattttcgaaattatttgaaatgagggtatttaatttcgggtgtagagataggtttttttaatgtttattgtaattagttatgggtattttgaagttaatgtgtgaagtatattatttcgtaaaagtgaagtttttggaataaaggtttgatataaatagtcgtggaggtgtttttagagaggttaagtgttttattgtttttgtagttttcgtaggagaaatgttagggaaattcgcggaagttttggttaaaagaaattgagtttttttgggttgtaggaatttgagttatatttttttggtaagtttattttatttttattgtttttttttttgtagtaaaaatgttttttaggtttatgttatagttagattttttttttttttacgagatttattaggatttttaggtttggtttaataattttgatttttcggttttgttaaaaattataattttgaagtaagtgaagttatagatttgttttttgttgtttttgaaggggagtaattttatattttttttttttatttagtaaaatgtttgtgtttgggtttcgtattttgtagtttgaacggtggggttttttattagggtaagcgtagatagatataggtttgtttattgttcgtataatttggaatttttttgtgaattaggagaagtaatttgtttttttgttttaataaattagtatagttattgtgcgttgaagttatgttttgaatgtagaggttatgaaggttttgtaggtatgtgtgtgttttttgtatatttgggttgagagtagttcgtagaaatatagaaaataaaattagagaaaggtaaatgggaagtataatagtggaatataaaatgaagataggagtgagttttataataaaagatttgaatataataaagttttgtgtatttatttaataagggttgtaaatttggttttaaattatattttttgttaagggaatgtgatttgtgtgtataagttataatataaattaatttaagttataattgatttgtaagattgtataggaatttttttgagtgtttaaaaagatagtatgtaagaatattagtttttattacgttaggattatatgagataatagtttttatagtacggtttgtatattttttaatgtgatttgatagtattataagaaatagagttttttgtaaagaattattagatatatatatagtataatattgggatggattttagggaatagagaagaatgggtttgttgaatatttttatgggatatttatgtaaagtttgagttttttttttgagtttttgatataaaagttgatatttacgttgattttgtagtttttggttagtatttggagtgtgttgataattgtgttatttggtaagtaaaaaattgtatggtcgagtaggtattaatgaagtttttttaagagagataagtagtttggtatagttagggttttgtatagttagggttttagtttatagtttttgtggagggtggttttagattatggttcggatagaggttgggtgtgtgtgttattattataggaatgataatagtggtttagttgttgtgttaagtattggttagattaagtttatttgataatttgtgagttggttaatatttgtatttgttttttatagtaatgtgatgttgtggtcgggagaagtgattaggatattaaggtatatttgttagtatgagaggttaattttgaatttaaggtagagtcgtgttttattttttttgtttagtaacgttttaaaatttgagataaatggtgatgttaggatttaaaattttattttataatgttttggaaatttgttagggtgagtaatattaaaatttttgtttggttaaaaaaattatagataaagtttttatgtatgttatattagtaagtatgtattaagattttagtattttttttaataaattttataagcgtttgttaattttaataatatagatggttttatttttttgttagttgtatatgagaaattttttttttttgatgagtggttatttttttagaagaagtttttgagtatgttgaataagagtttagttttgtttataaggaatgtggttttgaattttttaaaattaaatgttttgtgaaaggggaggagaaatacgttatttggtagggtgaagatttgaggtttttaaatattttaagttttattttaggtaaaaggtatttgattatttgttttttttggtttagaggttaaagtaaagattgattaggaaaaaaaaatatagtggtagattttagatttttaaaaatatgttttataagttattggagttaagtaaaagtagaataagttatgttagagtggaaagggtttttttgagaaagatttttgtgtaagaataataagtattaatggaggttgtgaattaaggattgatataggttttttttaattttaaagttttttaagaaaatgtatttttaaaataggtttttatttaaatatgtgtttatttgatagtttttttaaggatatatgttaaggagatataagaatttggtaatagttttgtttttagggaggagaattaggtagttcggggttaggggtttagagggagatttgttttttaatttgtttttttgtattattgggattttgtattaggagtatgttttatttatttttgtaaggtaagtgtggtttttgttgaggtttagggatatttttgggggtaggtttttatggtttttgagattgtttattttttttttttgaaggaagttatttgttttgagttttgagttgagatttattttttgtagaatgtggaagaagtagtttttttaaggggtaatgtgttgatagaaaattgttgaagtattttttttttgttattagtatgttttattatttttagagttgagggttatatgttattataggaggtattattggcgttttattttagtaataagtagaaagttgagtaaatcgaaaaattaatatttttttttagtttttttagagaattgaggttattgggtaaattattgttttttaaattggagagataggtaaatatagaagtataatttttagaggaagaaattagtagatagaaatttttaaggatttagtgtcggttgggaaagtttgttttgtaattgagaaattgcgggaggtttagtgtgggtagttttgtaaattaagaattttagtagagtttagttatggtgtagggtagtatgagatatttgagagtgttattttttggagttttgttaggtttttattacgaatattagggggaaaattttattatgtttttggtagtggaaggagaagaggaattattttgaaataggttggaatattttattattaatagaaggtttgtttttaggagaaattattttattagaggtttaatttggtgttttattagagggtgatttatttagagtaagggaaatatataattttatttttttttaatagttttgtattatttaaggggttggggaagttgagaagtaagtatgaagtttatagtttagggatataggtttattggaagattgtgatatgcggtaggattgtgtaatattttttttttttatagtttgttattacgttattagaagtttttttattatagttttttttatttagtatattatttttatattgtaaggtatattaaaaggtaaagacgtagtttgaagagattgtataagtattagaattagaatgagatatgatacgaacgttataattaattgttgtggtttgaatgtgttttcgaaaagtttatatattggaaatttaattcgttgtttttatgaatgaatttatatggtttttatggcggtgggttaatttttgtgggagtggttatgttataagagtaagttttttttatacgtgatgtttttttttatgttatgatgaagtaagaagatatttattagatgttagtattaagtttttggattttttagtttttaaattagtttaaattagttttttttgtttataaattatttagtttgtggtattttgttataattatagtaattggattaagatattattatatcggagtattaattataaaaaaattatgattaataggttaggagttttaatggaaaaaataggtaatatgtaagattagatggataatgtaagtagagttatggaattttttttttttttgagatagggtttggttttgttgtttaatttagagtgtagtggcgtgattttggtttattgtaattttaattttttaggtttaggtgattt

SEQ ID NO: 21 - DNA, 5312 bp, Artificial Sequence
  chemically treated genomic DNA (Homo sapiens)
gtcggtttcgggggtcgacgatttttcgggtaggcgacgtgttttgtttaggttttatttttcgcgttcgtaaaacggggtggataacgtagtttaaggtagagtcgcgttaaggtttttcgttgtcgtcgggttttggcggtttgatcgggtttggggttcgagcgtgttttcgggtttgggggggtcgtcgcgatggattcgttggtagcgttttaggatcgtttggtggagtagttgttgtcgtcgcggatttaggtttagaggcggtttaaggtgcgtgtgtggagagggcggaacgtgggtttgtgatttcgcgggtttcgggattcggtatggggttttcgttttcgcgcgttacggttcgttagcgtttaggtttagttttttttttcgtagcggtttcgtaggttcgcggttttacggtggggcgacgtgttttgtttaggttttattttacgcgattttaaaacgcggcggagaatgcggtcgtgggatttttttaggggttttaagggtttgcgggggttgggcgtttgggcgcgcgggcgggggaggttcggcgtcgcggtttataaataggcgttgtttcgttatcgtcgttgtcgtcgttttcgcggttggattcgggttaggtggggtttttcgttttttggtatttttcggaggggtgagtgtcgaggtttttagttttttcggtttatggagggttttgagtgtgttttaggggttttaattttgttgttttttgttcgaggagggaggatatcgtttgtgtttgttgcggtttgatatttttttacggaataaatatagtgtcggtttttgtagagttttttttgggattggggttaggggtgtttttttttgttattatttcgtttgtttttttatttttaggtttttgtttacgggttttttttttatttttgttaacgaaatgttttattttgggaatcgtattttttgttgtttttttatatcgtatttggtaagagatagggtattgggtttttggagaaatttttgtgtttttattttgttttattttgtttttaggatattgataagtagtacgtgggtttcgttatattgtttaattaggtgtatcgtaagtcggtgaagaaaggttttgattttatatttatggtggttggtgagtgggttaggtttttcgggggagtggttggggttattggttagttaagttttgtcgttggagttttagatttaacgtagttttttttttgtatttgtgtgtaggtgagttaggtttggggaagtttatattggtttatagtttttttttgatagatttgtataaggatcggaagttgtttagtgttgagggtgagtggtttttaggaggttttggtattgatttttagtttttttttatgggatttttttaaggatttttttttaggtttagtttttattgttttgttttcgcggtgtgggttttttgggggtagggttaaggtattaagatggatgaggacgagggttttggttgttaagggtgaggggttgagggttggagaggtttttttagtggtttttttttcgtagagcgtattagttagacggtagagattttaaaatatacggtggatattgaggagaagggagttaagttgaagtttattatcgtggatacgtcgggattcggggacgttgttaataatatcgagtggtgagtgaggtttgttgagaaaggttttgtttaggcggttatagtattcgaggtttggttttattttttttttgtttatagttggaagtttattatcgattatgtggattagtagtttgagtagtattttcgtgatgagagcggttttaatcgaaagaatatttaagataatcgagtgtattgttgtttatattttattttttttttcgggtatgggtgtgtggttgttttggggttaggttcgggagtgtagtttttataatatggttttttggttgtgtttatgtttatttttggttgttttcggtaggttgcggttagtggatgtgggttttatgaaggtattgtatgagaaggttaatatcgtgttttttatcgttaaagttgattgttttgtttttagtgagattcggaagttgaaggagcgggtgagtttgtcgtcgtataggggtttggttagggttttggggttgagagtattagggggatttgtttggttttaaatttgatggtttttgttttattatagattcgggaggagattgataagtttgggatttatgtatattagttttttgagtgtgattcggacgaggatgaggattttaagtagtaggatcgggaattgaaggtgaatatgtagattggtggggtaggggggatggagttggtgaggggtagaattagagggttttgttttttttatattgagtttgttggaggagggttaggttagtttagttgggtgtaagagttatttgttttaggagtagaggatttgtattttttttatttagggttagaaggtaaaggttattatgtttttgtttggttggggtgggttatgtgggtttcgtgtggtgtttggtaggtatggagtatttgtttagatttagaggtgtagtagtgggttaggtttttaattttaattttttttttatgggttattagaggaaggggttgttttagtggtatattttggtttttagatttttgagttttagggttggtggttttgggtgtttcggtagttagagtgatgatggagattatgttaggggtaggtggttattagggtaggggtattagtatggggagatataggtttagttttggggagggaaggggtagttggagggggtggtttttgatgagggaggagatgaggagggagtatgtttggttgggtatagtttggaaaggttttggaatgtgagttatatgggttttggttttagttaggggtagagaggttagaaaggggtaacgttaggatttttttgaggagagatagttgatggtgatgttggaggggtgtttcgggagttatatgttcgttttttattagtaatcgtgtaattacgtttatcgggtgtgagttttttttttttttttttttaggagagcgcgtttttcgtcgttataggtagtaatacggtggtggaggttaaggggtagcgggttcggggtcgattgtatttttgggggatcgtggagggtgagtagagttttggggtattaggtttggtgggggaaggttgttttgggtcggcgttagtttattatttatttttatttcgtagtggagaattaggcgtattgcgatttcgtgaagttgcgtaatatgtttattcgtacgtatatgtacgattttaaggacgtgacgtgcgacgtgtattacgagaattatcgcgcgtattgtatttagtagatgattaggtgcgcgttttagtcgcgagttagatttcgtttttttggtttcgtttacgtttttataattgagggtcggttttgttagtttatttagatttgaattttgtattattttttaagtttttttttttttttagagtttggtttttttagaattaagtttagggttgtgagggtttcggagggtagggttttagtagtggcggggatgggttaggtatcgttagtttacgttgagtttttcggtggcgtcgtttcgtttattttttttttcgtttcgcgtagtaaattgatttaggatagtcgtatggagagttttatttcgattttgtcgttgtttatttcggacgtcgagattgagaagtttattaggatgaaggatgaggaagtatgtggggcggcgggggcggcggaggcgggcgttagggatgttttttcgcggtgttgtttattcgtcgggttgttttcgttcgtagttgaggcgtatgtaggagatgttgtagaggatgaagtagtagatgtaggattagtgacgttcgtcgcggatatatcgttcgttttcgggacgttttcgtatttttggatattagatcggattgttttcgattcggagacgcggggttatagtttttagttgattttaatttatttttagtattatttttttttaggttattgtgtttgttttcgaggggtttggatcgtagttttcgtttagttggttttttttgattttgggggattaggagcgaagttgggcgggattttagagattcgttttttttgtttttttttcgttttcggacggttatagtatttaaatcgtaggttttgttttggtaggtaggtaaagttaggtagaagaggatttttaggattttgggtttgttttttgttttagtgttgtagaacggatttgggagtttttttttgtttgttttcgcgggttatttagcgagtgttgagattttattttttgtcgaggcgggtcgagtttttttttatttttagacgtttagcgggtagggttgggttgaattaaatgggagttttttagatataaggaggttagaggttgtaaggagcggggtcgtgatcgtttatattttttttttatagttcggttcgatttggagggttttcggggtattgggcggtgagttattttttggtaattttcggtgtcgttttttgttttcgttcgaggttttttttttttagtatcgttgtggtgtgtcgggattttgagtttaggtttttcgatgtttttattcgtatgattttttttcgttatacgatgtttcgttttttttcgttgtgaatgtcgcgttttgttttggtgataggagaataatgttggtgaacgtcgtagcgggtgttcgagtgtttcgtgtgtttttgagagcgggtgggagcggaagtttgagcggtttgcggttttcggcgatagtgtgttatttgtcgttgtagcgcgcgttcgcgcggtttttgggttatttttggttaggtcgtagtattgtggtcggtgcgggcgtggtaggggcggggcggttttatcgttcggttttttcgtttacgtttttcgttgtagagtaagtcgggttgtcgttttttcgttatgggtttcggtgagtttggagttcggtcgggttttcggttgttttttaggtcgattcgggttgagaggagttttggtcgtttggttgtagttgggagagatttgggttagatttagaggggatttttagtcggcgtgcggggtggttagggtggagaggttggcgggttatcgggacgtcgggtattaggggttggatggagtcgggtcggtagtttgggtatttagagatgtcgtttaggtgttcgtcgatcgttcggtttattgcggcgttttttttgtagg

SEQ ID NO: 22 - DNA, 5312 bp, Artificial Sequence
  chemically treated genomic DNA (Homo sapiens)
tttgtaagggaagcgtcgtagtaagtcgagcggtcggcgggtatttgggcgatatttttgagtatttagattgtcggttcggttttatttagtttttgatgttcggcgtttcggtagttcgttagtttttttattttgattatttcgtacgtcggttggaagttttttttaagtttgatttaagttttttttagttgtagttaaacgattagagttttttttaattcgggtcggtttagggagtagtcgggggttcgatcggattttagatttatcggagtttatggcgagaagacggtagttcggtttattttgtagcgggaggcgtaggcgggagagtcgagcgataaggtcgtttcgtttttgttacgttcgtatcgattatagtgttgcggtttggttagaaatagtttagaggtcgcgcggacgcgcgttgtagcggtagatagtatattatcgtcggaggtcgtaggtcgtttaggttttcgtttttattcgtttttaggggtatacggagtattcggatattcgttgcgacgtttattaatattgtttttttgttattaggataggacgcggtatttataacggaagaaaacggagtatcgtgtggcgggaagggattatgcgggtgggaatatcgggaggtttaggtttaggatttcggtatattatagcggtgttggggagaagaggtttcgagcgagggtaggggacggtatcgagagttgttaggaggtggtttatcgtttagtgtttcgggggttttttaggtcgggtcgggttgtggagaaggggtgtaagcggttacgatttcgttttttgtagtttttggtttttttatgtttggagggtttttatttgatttagtttaattttgttcgttaggcgtttggggataagggaagattcggttcgtttcgatagaaaatggggttttagtattcgttgggtgattcgcgggagtaggtaaaggagggtttttaagttcgttttgtagtattggggtagggaatagatttaggattttgggaatttttttttgtttagttttgtttgtttgttagagtagggtttgcggtttgggtgttgtgatcgttcgggggcgggggaagggtaagggaggcggatttttgaagtttcgtttaatttcgtttttgattttttaaggttagagagggttagttgggcgggggttacggtttaggtttttcggaaatagatataatgatttgggagggggtggtgttgagaataaattagggttagttgggggttgtggtttcgcgttttcgggtcgggaatagttcggtttggtgtttaggggtgcgagggcgtttcggagacggacggtgtgttcgcggcgagcgttattggttttgtatttgttgttttattttttgtagtattttttgtatgcgttttagttgcgggcggagataattcggcgggtgagtagtatcgcggaggagtatttttgacgttcgttttcgtcgttttcgtcgttttatatatttttttattttttattttgataagttttttagtttcggcgttcggggtgggtagcggtaggatcgggatggggttttttatgcggttgttttgggttagtttgttgcgcggggcgggggggaggatgggcggggcggcgttatcgggaggtttagcgtgggttggcgatgtttggtttattttcgttattgttgaggttttgtttttcggagtttttatagttttggatttggttttagggagattaggttttgggggagggggggggtttagggaatggtgtaaagtttaagtttgggtgggttgataggatcggtttttagttatggagacgtgggcggggttagaggggcgaggtttggttcgcggttggggcgcgtatttggttatttgttggatgtagtgcgcgcggtagttttcgtagtgtacgtcgtacgttacgtttttgaggtcgtgtatatgcgtgcggatgagtatgttgcgtagttttacgaagtcgtaatgcgtttggttttttattgcggggtgggggtgggtagtgggttggcgtcggtttaggatagtttttttttattagatttggtattttaagattttatttattttttacgattttttaggggtatagtcggtttcggattcgttgttttttggtttttattatcgtgttgttgtttataacggcgaagggcgcgtttttttgggggaaggagggagaaaggtttatattcggtgagcgtaattgtacggttattgatgggaaacgggtatgtaattttcggggtatttttttagtattattattaattatttttttttaaagagattttggcgttgtttttttttggtttttttgtttttggttggagttagagtttatgtggtttatattttagggtttttttaggttatgtttaattaggtatgttttttttttatttttttttttattaagaattattttttttagttgttttttttttttttagggttgagtttatgtttttttatgttgatgtttttgttttggtggttatttgtttttggtatggtttttattattattttagttgtcggggtatttaaagttattaattttggagtttagaaatttgggagttagggtgtgttattggggtagtttttttttttggtgatttatgggaagagggttggggttgggggtttggtttattgttgtatttttggatttgggtaagtgttttatatttgttaagtattatacggggtttatatgatttattttagttaggtaaagatatggtgatttttattttttagttttggatgaagggggtataggttttttatttttagaataaatgatttttgtatttaattgggttgatttggtttttttttagtaggtttaatgtgaaggagataaagttttttggttttgttttttattagttttattttttttgttttattagtttgtatgtttatttttagttttcggttttgttgtttgaagtttttattttcgttcgagttatatttagggaattggtatatatggattttaaatttgttaattttttttcggatttgtggtggggtaaggattattagatttgaggttagataagtttttttggtatttttagttttagggttttggttaggtttttgtgcgacggtaggtttattcgtttttttagttttcggattttattggggataagatagttagttttggcgatgagaggtacgatgttgatttttttatgtaatgtttttatgaaatttatatttattggtcgtagtttgtcgagagtagttaagggtgggtataggtatagttagggggttatattgtaggggttgtattttcgagtttggttttaggatagttatatatttatgttcgaagggggagatgaagtataggtagtagtgtattcggttgttttggatgttttttcggttgaggtcgtttttattacggaagtattgtttaaattgttggtttatatagtcggtgatgggtttttagttgtgggtaggagggaggtgaggttaggtttcgagtgttgtggtcgtttaggtaaggttttttttagtaggttttatttattattcggtgttgttgatagcgttttcgaatttcggcgtgtttacgatggtgagttttagtttgatttttttttttttaatgtttatcgtgtgttttagaatttttatcgtttggttgatgcgttttacggggaaggggttattggaagggtttttttaatttttagttttttatttttggtagttaggattttcgtttttatttattttggtgttttggttttatttttaggggatttatatcgcgagaatagaatagtgggagttggatttgaaagggagtttttggagaggttttatggaaggggattggggattagtgttagggttttttgggggttatttatttttagtattgagtagttttcggtttttgtataagtttgttaggaagaggttgtggattagtgtggatttttttaggtttgatttatttgtatataggtatagagaaggagttgcgttaggtttggggttttaacgatagagtttggttggttagtgattttagttattttttcgaggagtttggtttatttattagttattatgagtgtgaagttaaagtttttttttatcgatttgcggtgtatttggttgggtagtgtggcgaagtttacgtattgtttgttaatgttttggggataggatggaatagggtagggatataaaggtttttttagaagtttaatattttgttttttattaaatgcggtatgaggagatagtagagggtacggtttttagggtggggtatttcgttggtaaaaataaggggagggttcgtgggtaaaagtttggagataagaaggtaggcgaggtggtggtaggagaaggtatttttggttttaattttagggagggttttgtagggatcgatattgtatttatttcgtggggagatgttaggtcgtagtaggtataggcgatgtttttttttttcgggtagagggtagtaggattgggatttttgggatatatttaaggttttttataagtcggagaagttgggggtttcgatatttattttttcggagagtgttagggggcgggaggttttatttggttcggatttagtcgcgggggcggcggtagcggcggtggcggagtagcgtttatttatagatcgcggcgtcgagtttttttcgttcgcgcgtttaggcgtttagttttcgtagatttttggggtttttggaggggttttacggtcgtatttttcgtcgcgttttggagtcgcgtgaggtgaggtttggatagggtacgtcgttttatcgtggggtcgcggatttgcgaggtcgttgcggagggaagggttgagtttaggcgttggcgggtcgtggcgcgcggggacggggattttatgtcgagtttcggagttcgcggggttatagatttacgtttcgttttttttatatacgtattttgagtcgtttttgggtttgggttcgcggcgatagtagttgttttattaggcggttttggggcgttgttagcgagtttatcgcggcgatttttttaggttcgggggtacgttcggattttaggttcggttaggtcgttagagttcggcgatagcgagggattttggcgcggttttgttttaggttgcgttgtttatttcgttttgcggacgcgggaagtgaggtttggatagggtacgtcgtttattcgggggatcgtcgattttcgaggtcgat

SEQ ID NO: 23 - DNA, 6352 bp, Artificial Sequence
  chemically treated genomic DNA (Homo sapiens)
agggtattttatatttagagttttttttggtttaatagttataggtggtttgtggttattgtataggatagtatagtttttgaggaaggggattatgttttgtttttttgtgtttttagagtagtatatagtgtttaagttatattaggtgttttataaatatgtatttaatgaagaatattttttaatatttatttgaatttgttatgttttaaagaatatgatagatataattttattttaaagttagtattttagataatttagaataattggatttgtgttatttttaaaggatattttagtaagtttttgtcgaatttgtgtttgttttattattagattttagttttaataatagtatttttttttagagttagggttatttattttatttatttttatttgttattattgatttatttatttaataacgtgttagcgtttagggggaaaaggaagattgtgtaataaagatttaattatttatgatttttttttataggttttttttatttaggagggaatgtggattatatatatatattttaagaaaataaataatgaggaagttttggtgagattgaaaggtgttttgaattgggttgtttgttggttgtggttatgagaaggtttttggaattttttgtttttgttttttcggtgttggttttgagtaattattgtttgttttttgttgtaaaaaacgatggtaagattttgattgtttgtttagttgttgaggggtgggtgagaaaatttaagttgaaattttgttggagtgggaggagttggggattgttttagttattgttttttttgttattttagttattagtgttttttacgttttttagtgtttttattttgaagttttgatttgaagtgatatttaaagggtagtgattatggttttgcgttggtttaggattttagttggtttttttttttttttatatatatgatattaatatagatggttattagtgggttaaaataatatttttagggagtgtcgatattttaaaagaaaaatagtaaataggattatttatgtttttgaaagaagtggtagaaaatatagattagtcgtttaaaatgagtattaaaagtgtattttaaaagttagaagttattataatatgaaaaaatagagaatatagggaaaatatttagaagttttaggtgtaaaaaatatatataatagttaaagtaaaagttatattaatgggataaatagtgggagagatgtaattgaaaaataaaatagaaagatggaggattatattgaggagttagtttagaataaaagagggaagaattgagaagttattaatagaaaagttaggggaaaaggaggagagaattatttaaatatagattatatgagttttataaagataaaaaatagaggagaaaaatagttaaagaaataaaaagatgaatttttagaattaaaagatagagaagatttataatgttttatagagagaaggaaaaatttattttagatatattagtaaaatttaaaaatattaaagataatgagaaaattttagaagattttagtatgaaagattgatatgggattttttaattgtgatattggatgtaaaaaaaaaaatttggaatgatgttatttagaatattaaaggggaaaatattttaaatagtatgtaatatatagttaaattttatttaaaagtgttggtataattttaaaaaattattaagtatataagattttagaaggtttgttatgtaaatttttatatttgaaaggttttggaagaagaattttaattagagaacgtattttagaaggtgttaaaagatatgaaaagtaatgttgattaaataatttggtgaaggagaaaatatgtgaataaatttgaaagtatgttaaagtttttatttagttagagggaagatggagaaggtatcggtaatatttaaaaaaaaaaaaggtaatgaagattaaaaaagaaaatttggtcgggtgtgatggtttacgtttgtaattttagtagtttgtgaggtcgagttaggtagattgtttgagtttaggaggataagtttgggtaatacggtgaaatttcgtttttattaaaatataaaaaaaaaaaaaaaaaaatagttaagtatggtggtatgtatttggagttttagttattcgggaagttgaggagaatcgtttgaattcgggaagtagaggttgtagtgagttagtttagattatgttattatattttagtttggtaatagagcgagatttcgttttaaaaataaataaataaataaataaaaaaattttaaaaaatagaaatattgaaataaataaggtattataaataagtttaagtgtattaatatttataataaatataattagaatgtagtaaagatagggttatgtgtttattaaattattatatttttttgtatatataggtaacgtatatttttttattttcgtgcgtttatgtggggttattgtttattttttgttaatggaatgtgagtagagatggtaaatagtttttggtttaaaattatggaaataatgtgttttttttaggtttttttttttatttgtaaagttaggagtttatgaagtgttttttaataatagagatgtaaagtggagtttagttattttgaggtatgttttggaaaagagttatagagtgtttaatttgttttgaattatacgtggttaaaaaataaatttgtgttttgttaaattattgaggttttagtgtttgttttttgtagaaataagtttgtttattttgattattatatgaattgaatataggttagaagatagagatcgttagattgaattagaagtaaaaatttatatttatgatattttaagggttatatttaaagtataagtataaaggaagagtaaaaataaaagagtagaaaaagatatagtgaataaatatttaaagatagttgtagaatttattattattagataagatagagtaggatagaaagatttttaggataaattgggaaaaggtttagtttattaagattgtaataatttttaagagtaaatattttaataatttaaatgtagagagggtaaaagttgatttaaaaattagaaataagttgaaaaatttatagttatagttagagatttaaatatattatttataggttaggaattgtggggtatgtttatagttttagttattttgggaggttgaggtaggaggatcgtttaagtttagttgtttgaggttgtagcgagttatgattattttattgttttttagtttgagtaatagagtaaggttttgtttttaaaaaataaataaataaatgtattatttttagttatgtataggttagtttaaagataaagaaaatcgtaataaattagaatgataaaatttatatgtttgatttaataaatatgtatatgtataaaattttgtattatatttattagagtttatgtgaaatatttatagaagtttattatattttaagttatagaggattattatgtaattaaattataagttaataataaaaaatatattttaaaaaatttatgtatgtttttaaataaaaaaaaatattcgatattcgattgttattaattaaagaagtaatattttttattatgagttttttatggttttttcgttttttattttatggttttagtttttattttatttggggggaggtgaaggtggtaagggttttaattagggtaggattaaagtagtgaagatattgtttatttatgcgtaggtgttttttaggcgtttatgatgtgttaggtattacgtagatattgtggattagaaacgaaaaaattaagattagggttttttataaatcgggttatgtaaattaattattagttgttatttgattaatttgaagttagaagttgtgtttgttttatttaaaataggtattttttatttattgaggaaagagtattggagtaggttttattagtttatagattattcgagaattatttggggagtatgttgaaaatataggttttttggttttgttttggaaaggttaatttaatttattaagtaaagaggaaatttaggaatacgtattataacgaattttttaggtgatttttatttggaattagagattcgtatgattttttagttttttttaagttgaaaattatcgattttatggtttttgatatatggtttaatttggttagatttttttttatatagacgttagttttacgttgttgttgttttgttttgttttgttttttaaatatatatattggattaaatttttttagtgttttttattagtcgagtttaattagaagttaaaggtaagggtgatgtcgttttttagtttgtgttagtttggaggaggtgttcgggttttggagggattaatagagaggattagtatttttgtttttttcggggagtttacgggagttttttatattttgttttagattaaataattttaataattatatatttttttttatataatgaaattaaataataataaaagaaaaataaaataatatttttgaaagtgatttaaagttttaagaggtttttattttattgtgtagttaatgttttttttttaaagattattggtaaagtttattttattttttaatttaaaatttgtttacggaaattttttgggaaagtaggattttttgtatcgtagatggatatagagagaggatttgttggagtttagttgcgcggtgttttgacggttttttttttttttttagggggtttttttttggaggacgtggtaatagttggtttaagttttttttattttttaaaattttttttggttttttttgggggtttagtgaatttttttatttttttatttcggttttttttttttttatttagtaatagatatatttatttagagaatttttgtgattggttgaagatagaaggggtcgtttttattttcgaatttgttttttttttttttattttcgttttgtttttgtttttattatacggattgagattgatttgattaaagtattagagtgtaatggtttttagagtagggttggttttggggttttatattttgatgatttttttgagttcgtaggaggtaggggttattaagggtgagtgcgagggcgaggagggtgcggcggggagtagagatttacggagttgggttatatgaggaggtggtatggaggatgtttgtttttttcgttttttggtttatgggtaattttttttattaagagatatttaattttttttatttttgttatatttattttggatttaaatgaagatgtagttcggttagttgcgtaggtgttttagttagtttttgttgacgtttagatttttttttattttttttttttttttgagatttaaatttttatttaatagatgttagtaagtattttgatttttttattatttttggtttggaatgtgttcgattaagtttagttttgttgtagtatttatgtttatgtcggtagttaattatttatttgtttttgtttttcgggagatatgagttggggtgcgggtttatagatggtttatttttttttttttttatttttttggttttttattgtgttgggtgtatgttagttttttaataattgttgtttaaataattttatagagttttataagaattaaaatttaatttttaatttttagaaaattagataatagttatggaagagttatatttagttataatgttttgagatggaggaattgggatatgaattttgatttttgatttttcgtttagtgttttttgtaatgttttgagttgtttttttttatttttttggtttttgggttattaattttaatttttatttttgttagtcgtggtttgtttttttttatatttatttgtattgtatttttgtgtaaagttttatatttttttgtttttaattatttttttttattttatttttatagttttattagtttataatatagggtttgataatatagttagggtagatgattatagttaagatttaaattttggaattttaagtatgattttaggtagttttttttttttttattttgatatgttagattgtattgtttttgtgtcgattgtagtgtgttgggatgagtttttttttttttgtttttttttttttttttttttttagggttagtttagtgttagaataggattttgtttttatatagaatttaggacggggtttaggtttagggatttaataattatatattgtggatgagatagatatatttttttttttttttttgattttgaattcgttaaatatagt

SEQ ID NO: 24 - DNA, 6352 bp, Artificial Sequence
  chemically treated genomic DNA (Homo sapiens)
gttgtgtttggcgagtttagggttaaggagagagaaaaaaatgtgtttgttttatttataatatgtgattgttgagtttttgagtttgggtttcgttttgggttttgtgtggggatagagttttgttttgatattgggttggttttgggagagagaaagggagagagaataggaagaaagaggtttattttagtatattgtagtcggtatagagatagtgtagtttggtatattaggatgggaagaggagggattgtttaaaattatgtttggggttttagaatttaaattttggttgtggttatttgttttggttgtgttgttaggttttgtgttgtgagttggtgggattgtgggggtgggatgaggaggaatgattaaggataggagagtatggagttttgtatagagatgtagtgtaggtgggtgtgaggggaaataggttacggttggtaggggtaagaattaaggttagtgatttagagattaaggggatagggagaggtaatttaaggtattataaagagtattggacgaggagttagaagttaaggtttatgttttaatttttttattttagagtattatgattgagtgtggtttttttataattgttgtttagttttttggaagttagggattaagttttaatttttgtagaattttatgaagttgtttgagtaatagttattgaggaattagtatgtatttagtataatggggggttagggaaataaaagaaaaaaaagatgaattatttgtagattcgtattttagtttatgtttttcgaagaataaagataggtaaatagttaattatcggtatgggtataaatattgtaatagaattggatttgatcgggtatattttaggttaggggtggtagagaaattagggtgtttgttggtatttgttgggtggaggtttgggttttaggaaggaggaaggaatgaggagaaatttgaacgttagtaaaggttgattggggtatttgcgtagttgatcgagttgtatttttatttaggtttagagtggatgtgatagagatgagggggattgggtgttttttggtgaaggaagttgtttataaattagagagcgagaggaataagtattttttatgttatttttttatgtaatttaatttcgtaaatttttgtttttcgtcgtatttttttcgttttcgtatttatttttggtggtttttgttttttgcgggtttaggagggttattagggtgtggaattttaggattagttttgttttgagggttattatattttggtgttttaattaaattagttttagttcgtgtggtgaggataggaataaggcggaggtaaagaagaagaaaatagattcgaggatgggggcgattttttttgtttttagttaattatagaaattttttgagtgaatgtatttgttgttgggtaaagagggaaagagtcggggtgagaaggtggaaggatttattgggtttttaggagaggttaaaggaagttttggaggatgggaggggtttggattaattattattacgttttttaagaagggattttttgaagagagagaaaaggtcgttagagtatcgcgtagttgagttttaataaattttttttttatgtttatttgcgatgtagggaattttatttttttaagaagttttcgtggataaattttgagttagaaagtaaaataaattttattaataatttttaaaaggaaaatattggttatataatggaataaaaattttttaaaattttaaattatttttaaaaatgttattttattttttttttattattatttaattttattgtgtaagaaaaaatgtgtaattgttggagttgtttggtttaaagtaaagtgtaaagagttttcgtggatttttcgaggagggtagaggtgttggttttttttgttggtttttttaggattcgggtattttttttaggttgatataggttggaggacggtattatttttgtttttggtttttggttgggttcggttaataagaggtattgggagaatttagtttagtatatatatttaaaaaataaaataaaataaaataataataacgtaaagttaacgtttgtgtaaagagaaatttaattaaattaggttatgtgttaaagattatgaaatcgatgatttttaatttggagggagttaggaaattatgcgggtttttggttttaaatgagaattatttggggggttcgttataatacgtgtttttgagttttttttttatttaatgggttagattagtttttttaaggtagggttagggaatttgtgtttttagtatgttttttaggtggttttcgggtagtttgtggattggtaaaatttgttttaatgttttttttttaatgaataagggatgtttattttaagtggggtagatatagtttttgattttaaattaattaaatgatagttagtaattgatttgtatggttcggtttatggggagttttaattttagttttttcgtttttagtttatagtgtttacgtaatgtttagtatattataggcgtttaggagatatttgcgtatgaatgaatagtgtttttattgttttggttttgttttggttaggatttttgttatttttatttttttttaagtgaggtgggagttggagttatgagatgaaagacgggaaagttatgaaaaatttatgataaagaatgttgtttttttggttaataatagtcgagtatcgggtgtttttttttatttgaaaatatatatagattttttaaagtatgttttttgttattaatttataatttaattatatgataattttttatggtttggagtgtggtgaatttttgtaaatattttatatgggttttaataaatgtgatgtagaattttatatatgtatatgtttattggattaagtatgtggattttgttattttaatttattacggttttttttatttttggattggtttatatataattaagagtggtgtatttatttatttattttttagagatagggttttgttttgttgtttaggttggagggtagtgaagtaattatggttcgttgtagttttaaatagttgggtttaagcgatttttttgttttagttttttagagtagttgggattataggtatgttttataatttttggtttatgaatggtatatttaaatttttaattgtgattgtaggttttttaatttgtttttaatttttaaattaatttttgttttttttgtatttaggttattaaggtgtttatttttgggaattattatagttttggtgaattgagtttttttttaatttgttttgagaatttttttgttttattttgttttgtttgatagtaataagttttatagttgtttttgggtatttgtttattgtatttttttttatttttttgtttttattttttttttgtatttatgttttagatgtagtttttgaaatgttataaatatagatttttgtttttgatttaatttgacgatttttgttttttaatttatgtttaatttatatggtagttaaagtgagtaaatttgtttttgtaagagataaatattgaagttttagtggtttaataaaatataggtttattttttagttacgtgtagtttaaggtaggttgggtattttgtagtttttttttaaaatatgttttaaggtggttaagttttattttgtatttttattattgaaaagtattttatgaatttttagttttgtaggtaggagagagaatttgggaaaggtatattgtttttatggttttggattagaaattatttgttatttttgtttatattttattggtaagaagtaaataatgattttatataggcgtacggggatggaaaaatgtacgttatttatgtgtgtaggaagatataatggtttggtgagtatatggttttgtttttgttgtattttgattgtgtttattgtgaatattgatgtatttgggtttgtttgtaatattttatttattttaatatttttattttttaaagtttttttgtttgtttgtttgtttgtttttgagacggagtttcgttttgttgttaggttggagtgtagtggtatgatttgggttggtttattgtaatttttgtttttcgggtttaagcgattttttttagtttttcgagtggttgggattttaggtgtatgttattatgtttggttatttttttttttttttttttgtattttagtagagacggggttttatcgtgttgtttaggtttatttttttgagtttaggtaatttgtttggttcggttttataaattgttaggattataggcgtgagttattatattcggttaagtttttttttttaatttttattgttttttttttttttaagtgttatcgatattttttttattttttttttgattggataagaattttagtatgtttttaaatttatttatatatttttttttttattaaattatttggttaatattattttttatattttttggtattttttagaatgcgttttttgattagaattttttttttaaaattttttagatgtgggaatttgtatagtaaattttttaaagttttgtatgtttgataattttttaaaattatattagtatttttgaataaagtttagttgtgtattatatattatttgaagtatttttttttttaatattttaaataatattattttaaatttttttttttgtatttaatgttatagttagaaaattttatgttagttttttatgttggaattttttagaatttttttattgtttttgatatttttaaattttgttagtgtgtttagagtgggtttttttttttttttgtaagatattatggattttttttattttttaattttgggaatttatttttttatttttttaattattttttttttttattttttgtttttgtgaaatttatataatttatatttggataattttttttttttttttttttgatttttttattgatgattttttaattttttttttttttgttttgaattagttttttagtgtagttttttatttttttgttttgttttttagttgtattttttttattatttattttattaatgtggtttttattttgattattatatatattttttatatttagaatttttaggtgttttttttatattttttatttttttatattataatagtttttgatttttaaagtgtatttttaatgtttattttaagcggttggtttatattttttattattttttttaaggatatagatggttttgtttgttgttttttttttgaggtgtcggtattttttaaaggtattattttgatttattagtggttatttgtgttggtgttatgtgtgtaaagagaaaggagggttagttggagttttaggttagcgtaaaattatagttattattttttgggtgttattttaggttaggattttagggtgggagtattaggaggcgtagggagtattgatagttggggtggtagaggaggtaatgattagggtagtttttagttttttttattttagtaggattttagtttggatttttttatttattttttaatagttggataggtaattaggattttgttatcgttttttgtagtagggagtaggtagtgattgtttaaggttaatatcggggaggtaagagtagaaggttttaggaatttttttatagttatagttagtaagtaatttagtttagaatattttttagttttattagggtttttttattatttgtttttttggaatgtatatgtatggtttatatttttttttagatggaaagggtttgtaagaagggattatggatgattgaatttttgttatataattttttttttttttttaaacgttagtacgttattaaataaataagttaatgataataaataaaagtgaataaagtggataattttgattttagggagaggtattgttattgggattagagtttaataatgaggtaaatatagattcgataaaaatttattaaagtgttttttaaaaatgatataaatttagttgttttaaattgtttaaaatgttgattttgaggtaaagttgtatttgttatgttttttggagtatgataagtttaggtaggtgttgggggatattttttattaaatatatgtttataggatatttgatgtgatttaggtattgtgtgttgttttgggagtatagaagagtaggatatgatttttttttttaaggattgtgttgttttgtgtagtagttataagttatttgtagttattaagttaaaaaaaattttaagtataaaatgtttt

SEQ ID NO: 25 - DNA, 8093 bp, Artificial Sequence
  chemically treated genomic DNA (Homo sapiens)
ttatggaaggaaatgagattagttagcgagttgatatagaataaggtagtttaaaataaatttttttaaaaatacgaagaatagatattgaagggaagaggtgtttgtaaagattaagaaagtatatttggagatggtatttttttaaagttaaagttattaagtgtttaagtgttttaaggagggtaagattattaataaggatttagtatagtagagtaatttgagtggtaatacgggatattgggaatataaatttgttaagaaaattagtaggaatgagttataggatagtaattggtaaggatttaataattttttttttaatgtacgtattttaattatatttattgttataataggattagtaataattatatttatttaaaaaaaaaaagattgttatgtagttatagaattatttaatatagaaaatagtaaaatatatttttttttttttttttttttttttttttttttataaataagattagtttatagtaaattttttatagttaagggttaatttaaaatttttggtttatattttttttttatttaatgattatatgatgtaaattaattttattaatattttaagtaaaatatattggaattttataaaatgtataagattttaatatttaaggaattggggttagaaagtagaagtggtttttaggttttttagttttttttttaagtaataaagttttgttgtgaatatttaaagttattgggaaattatcggtagatttttttgtttttttttttcggttttttattatgttgtttttttagatatgtaagtttattttattaattaaaattttagtttgattatttttgataagtatttaatcgatatgtaattttttttttgttttaaatatgtataataggatagagtttttaaatttgatttaattattaatttttgatttataagtgttatggtgagttaatagaatttattaatgtttttattgtattttattagttaaatttagaaggttggaattagttttttttatttagtattttgttagtttgtttagtttgtatttttaattttgtttttaatggtaatttgttttattttttgaaataaaataatttatattttgggagggttaattttttattgtgttaggttgttttatgtattgtaggggtgagtgtttttaggtttaaatgttaatagaagtttttagtaaatatgataattaaaaaagtgtttttatatattttttagtattttttggaatgataggttattgtttttagttgaaagttattggtataattttggtttttaagtttttatgttatttattttaattgtttagatattaattttatttaaatttttagttatagtttggttttttgaatttgttggattagtaattatagattaaggtgttttaatagttaagataggattttggaataagagtttttaaattgtataatatttgagaggatttatgaatataaattgggttttgtttataattagttttatataatgaattttaagattgtttttttatggtgaatagaagtttggaaattattgttttggtataaagtagattattttagtagaaatatagaattattgtaatttgtgaataagattgtttttaaatatttttatttgtgtgttattttatatatagaatgtgtacgatagttttaaattttagaataaatttatttttagtatttaataaaatttgatattgtattattttaaaataaagtgtttattttaggtaggattttttaaaataaagtagtaatatttacgtagataagataaaaaagttaaaatattttatattttttaattttggagtgtaattttttttttttatcgtttttgatagggttaaatttgtgtttatagtaaaaaaaaaaaaaaaaagaattattaattggtaattattaagattttatatttattatagttttttaataggtaagttgataaaatagtttttagttattaaaaaaaaaatttaaggaaaatttttaataattagttttatttttaaattgtatgaagttttttatatttgaaatttaaaaatgattttaatgattttttttattagtaatgtgttattattgaggtgggtgatggggagggaagagggaagaaatttgttagtattattttcgaatttagaaatgtttaaaaaaaagttttaaatattttgatggttagataaaatatttttattgttatgtatgggttttttttttggaaatttatgaatttgttatgtgagtttttgtaaattggtttaaaagtatatttaaggagttgataatttaagattatatgaattagaattttaatattttattaaaataagagttgaaatttttggtatttatttttagaatatttaaaaaatagattgtaaatttaatttatattaatattaaatttttttaaaattaattatattataaaagataatgattttgttattaaattaagttttaaaaaaggtggtatttttatgttttagttttatgttgttatttgagatgaaaaaaaaggtaattgttagaattttaattgtgattagtttggacggttggtatttggtatttttttataatttaaattagtaaatttgaaaatttaaattaatttttgtttttagaattaaatttttgttgagttttttaattttgtattataaagttttatggattagatttattttttttttttataaggttattttaatcgggttttattttagttgtggtaattcgaaatagggtttggagatgtttatttgttaatggttgatttaaagtgtgttggtttcgagttaaatatgaaaaagtttttttatagatttggttattattaaataaggatgttattttataggtaatttttttgataattgggtaggatttagtagataatttagtataaaattgttttaagtttttgattttgtatttattttaaagattagtgtttgtttgaagttttgttagttttatttttattgaaataggtgtatatttaggtttaaagttaaatggatttgaaaaaagttttaagttttttttaatgaatttgaggtttttaaaatgttttttaaattttttttggagacgatagattattatttgatatttattaggattaaatatttttttattttttttattttgttgttttagtttattaataatttttttgagggtaggaaagtttgttagatttttttttttaatatgtttttgaaataaatttagtttaatttcgaaagtataaatatggttaaaggtagtagtagtaaagattttattaattcgtaattttttattgagttttcgaaggtgttttataatgtttattaagaagttaaagttataaagttattgtttgtttgagaagtggattgttgttgtttttattgaaattaagaacgtttttatttttttttttagagagaatattagttttaaagtttttttttttttaagttaattgtttagatatcgtttattaatttttttattatgttttgatttagatttcgttagtaaagtttgaaatttaggtcgtttaacgtttttggttttaattaaaattatttattcggatatggtatttatgatttgattaatatttatattataggagtttaatagttttaagtgaagaaattttgaataatgaatgatattttaatagttggggtttacggtttttttttttatgtatgagacgagttttgagtttttattaattatttttaaagtatgggtcgtggttagtttaattattttttgtaagttaagttttgttgtttgtagggattttaggattgtcgatatgagcgtattaatattgaaatgatgagttaggttgattatggttagaagatttttttgtatttttaatttagggtttatatcgcggataaagattaggaggtagtttttataggttataaaagtttggtcgtttaaggtaagagaataggttttaaagtttttggttcggttaaaaagttggttgcgtagatttttgttaatgtttaggattttttgttttgtgatatttggagataagttaacgttttgtaggacgtttatatgttcgggtagtattttttttagtaatatttttatgtattggtatataaagttttttttattttagtcgcgattttttaaggttaagaggcggtagagttcgaggtttgtacgagtagttttttttttaggagtgaaggaggttacgggtaagtcgttttgacgtagacgttttattagggtcgcgcgttcgtcgttcgttatatatcgttcgtagtattcgtgtttagtttcgtagtggcgtttgacgtcgcgttcgcgggtagttacgatgaggcggcgatagattaggtatagggttttatcgtttttcggaggttttattattaaataacgttgggtttattcgggtcggaaaattagagtttcgtcgatttttattttgttttttttgggcgttatttatattttgcgggaggttataagagtagggttaacgttagaaaggtcgtaaggggagaggaggagtttgagaagcgttaagtatttttttcgttttgcgttagattattttagtagaggtatataagttcggtttcggtatttttgtttttattggttggatatttcgtatttttcgagtttttaaaaacgaattaataggaagagcggatagcgatttttaacgcgtaagcgtatatttttttaggtagcgggtagtagtcgttttagggagggacgaagagatttagtaatttatagagttgagaaatttgattggtatttaagttgtttaattaatagttgtcgttgaagggtggggttggatggcgtaagttatagttgaaggaagaacgtgagtacgaggtattgaggtgattggttgaaggtattttcgttgagtatttagacgtttttttggtttttttggcgttaaaatgtcgttcgtggtaggggttattcggcggttggacgagatagtggtgaatcgtatcgcggcgggggaagttatttagcggttagttaatgttattaaagagatgattgagaattggtacggagggagtcgagtcgggtttatttaagggttacgatttaacgggtcgcgttatttaatggcgcggatacgtttttttgttcgggtagaggtatgtatagcgtatgtttataacggcggaggtcgtcgggttttttgacgtgttagttaggtttttttttttttcgtagatcgtgtgtttttttatcgttttttttcgagattttttaagggttgtttggagtgtaagtggaggaatatacgtagtgttgttttaatggtatcgttaattaagtaaggaagttatttaatttaaaattatgtatgtagaatatgcgaagttaaaagatgtataaaagtttaagatggggagaaaaatttttttttagagggtattgtgttattgtttttttgttttttatttattttagaaattatttgtttatatttaaaggtataatttattttgagttttttttaaaataaatcgtttgtagttttaggataggttgatgtattttgggtttgatttttgattattttattgttaaattagtgattttttttagtgtttttttgttttttatttcggaggacgtatttcgaagatattagattttatgggttatttttggattttgaagtttataattgtgataaaaaatgtgaagggaagagatttgaaatatgtggaaggaaaagtgagtgtagattataaatttttaaaaagataagtttaaaatatatttaaacgttatgttagattattttgttaaaattagttgttagtgacgttcgtacgttaatagaaaaaagaatgttttagtttggagtggtaggtttttagagggatttattgtgaaagtataaattatttagggtaatgggattgagagaatagtgggtagaaaggattattgaaggaaaggaagagaattggaaggtagatgaaagaaggagtaagaatttggggatgtttttttttttttatttgtaatagtagtaatagaagtaatggtagattggtttttgtttttattgtgttagaatgaattgataggataattgggtttattattgtattgtgttagaatattgtaaaataaaattaaatatattagtttggtggtttgtaattaattatttaagtggagatttttattttttttttattttttttttagacggagttttattttgttatttaggttggagtgtagtggcgcgattttagttgattgtaattttttttttataggtttaagggagatttttttgttttagtttttcgagtagttaggattataggtatgtgttattatatttggttaattttgtatttttagtagagatgggatttttttatgttggttaggttggtgttaaaattttcgattttaggtgaatcgtttgttttagttttttaaagtgttgggattataggcgtgagttatcgcgttttgtagttttttgtatttttaatagagatagggttttattatgttagttaggatggtttcgattttttgattttaggtgatttgttcgttttggttttttaaagtgttgggattataagtatgagttatcgcgttcggtttaagtggagatttttatatggagtttagttatattttttttaatatataagttgagatgattaatataattttaatataggggtttatgagaaatgtttgtaatatttaagtaatttattgtttttttttttttttttttaagatgaagttttattttgttgtttaggcggaagtgtagtggcgtgattttggtttagggtaatttttgttttttggttttaagcgatttttttgttttagtttttcgagtagttgggagtataggcgtgtatgattatattcggttaatttttttatttttagtagagacggggtttttttatgttggtcgggttggttttgaatttttgattttaggtgattcgtttattttagtttttttaagtgttgggattataggtgtgagttttcgtgtttagtttattattttatttttgaataaagaattgtttgtgtggggaatagataatttttttttatgtagtttttgttagaaaatttgttttttttagtagttggtttgtgtttataggttattttttgaaagtataaaaaatttattgattttttttttttgggtttttttttttttttgagatagagttttgtttttgttgtttaggttggagtgtaatggcgcgattttagtttatcgtaatttttattttttgggtttaagtgatttttttgttttagttttttgagtagttgggattataggtatgcgttattatgtttggttaattttgtatttttagtataaatggggtttttttatgttggttaggttggttttaaatttttgattttaggtgatttattcgttttggttttttaaagtgttgggattatgggtgtgagttattgcgtttggttagaaaatttattgattttttaaagatttattaattttttgtattattttttttttttttttttatcgtaaatataaaagggaatagtagagaaaattatttagaattttattttttagtgatattatttagtgatattttattagagttatttaggaatttgaggttgaataaagtttaggtaaaagtaaaattagttgagaagagatatttgttaaaagaaatttatttttaattttatttgttgttttttttagaggaatagaaatagtgttgaatgttttattagaaatgatggttgttttgttcgtttttttttttttttttatataatatgtaaatttatatagtgtatgagtttgtaagataaaggaaaaatacgttaatgaggtattattgtttgtatttggagtttgttattattgtttggtttatattaaaatatgtatattagagtagttgtagattgataaattattttttgtttgatttgttagt

SEQ ID NO: 26 - DNA, 8093 bp, Artificial Sequence
  chemically treated genomic DNA (Homo sapiens)
attggtaaattaaatagaaaataatttattagtttgtaattattttaatgtatatattttaatatgagttaagtaatgataataaattttaaatataaataatagtgttttattaacgtgttttttttttgttttataggtttatatattgtatgagtttatatattgtgtgagagagagggaagagacgggtagagtaattattatttttaataggatatttagtattatttttgtttttttaggaaagatagtaagtgaagttaaaaatagattttttttggtagatgtttttttttaattaattttatttttatttgaattttatttagttttaggtttttaagtgattttaataaaatgttattaaataatgttattaaaaaataaaattttgaatgattttttttattatttttttttatatttacgatggaggggaaaaaaaaaagtaatgtagaaagttaataaatttttaggaagttaatgaattttttggttaggcgtaatggtttatatttataattttagtattttgggaggttaaggcgggtggattatttgaggttaggagtttgagattagtttgattaatatggagaaattttatttgtattaaaaatataaaattagttaggtatggtgacgtatgtttgtaattttagttatttaggaggttaaggtaggagaattatttgaatttaggaggtggaggttgcggtgagttgagatcgcgttattgtattttaatttgggtaataagggtaaaattttgttttaaaaaaaaaaaaaaatttaaaaaaaagaagttaataaattttttgtgtttttaaagagtagtttataagtatagattaattgttagagaaaataaattttttagtaggggttgtatgagaaagagttatttattttttatatagataattttttatttagaaataagataataggttgggtacgggggtttatatttgtaattttaatatttggggaggttgaggtgggcggattatttgaggttaggagtttaagattagttcggttaatatggagaaatttcgtttttattaaaaataaaaaaattagtcgggtgtggttatgtacgtttgtatttttagttattcgggaggttgaggtaggaagatcgtttgaaattaggaggtagaggttgttttgagttaagattacgttattgtattttcgtttgggtaatagagtaagattttattttaaaaaaaaaagaaagaagataataagttatttaaatattatagatattttttatgagtttttgtattgaagttgtattagttattttaatttatatattaaaaagagtataattggattttatataaaaatttttatttgagtcgggcgcggtggtttatgtttgtaattttagtattttgggaggttaaagcgggtagattatttgaggttaggaaatcgagattattttggttaatatggtgaaattttgtttttattaaaaatataaaaaattgtagggcgcggtggtttacgtttgtaattttagtattttggaaggttgaggtaggcggtttatttgagatcgagagttttgatattagtttgattaatatggagaaattttatttttattaaaaatataaaattagttaggtgtggtggtatatgtttatagttttagttattcgggaggttgaggtaggagaattttttttgaatttgtgaggaggaggttgtagttagttgagatcgcgttattgtattttagtttgggtgataaagtgagatttcgtttaaaaaaaaaataaaaaaaaaataaaaatttttatttaagtaattaattataagttattaagttagtatgtttagttttgttttatagtattttggtatagtataataataggtttagttgttttgttaatttattttaatatagtagaaataaaagttagtttgttattgtttttgttattattattataagtgaaaaggaaaaaatatttttaggtttttgtttttttttttatttattttttaatttttttttttttttttagtggttttttttatttattgtttttttagttttattgttttgaatagtttatatttttataataaatttttttagaaatttattattttaaattgaagtatttttttttttattaacgtacggacgttattaataattgattttaataaaataatttgatataacgtttaggtgtattttgggtttgtttttttggaagtttatagtttgtatttatttttttttttatatgttttaaattttttttttttatattttttgttatagttataagttttaaaatttaaggatgatttataaaatttggtattttcgaagtgcgtttttcgaaataaaggataggaaaatattaagaggggttattaatttaataatagggtaattagaagttaagtttaaagtgtattagtttgttttaaaattataaacgatttgttttgaaagaaatttaaaatgaattgtgtttttggatgtgaatagatgatttttggaatgaatgaaaagtaagaaaatagtaatatagtattttttgaaaaaaggtttttttttttattttaagtttttatatattttttaatttcgtatgttttgtatatataattttaaattaagtggtttttttatttagttaacggtattattaagataatattacgtatatttttttatttatattttaaataatttttaaaaggtttcgggggagagcggtaaagaaatatacggtttgcggaaaaggagaaggtttgattggtacgttagggaattcggcggttttcgtcgttgtgggtatgcgttgtatatgtttttgttcgggtaaagaggcgtgttcgcgttattgagtgacgcggttcgttaagtcgtagtttttaagtgagttcggttcgatttttttcgtattagtttttaattatttttttgatagtattagttggtcgttggataatttttttcgtcgcgatgcggtttattattgtttcgtttagtcgtcgaataatttttgttacgaacgatattttggcgttagaagagttaaggaaacgtttagatgtttaacggaagtgtttttagttaattattttagtgtttcgtgtttacgttttttttttagttgtagtttacgttatttagttttattttttagcggtagttattgattggatagtttgaatgttagttaaattttttaattttgtgggttgttgggttttttcgtttttttttgaagcggttattgttcgttatttagaaggatatgcgtttgcgcgttagagatcgttgttcgttttttttattggttcgtttttaggagttcggggaatacgaaatatttagttaataggagtagagatgtcggaatcgggtttgtgtgtttttgttgaggtgatttggcgtagagcggaggaggtgtttggcgttttttaggttttttttttttttttgcggtttttttaacgttggttttgtttttgtggtttttcgtagaatgtggatgacgtttaaaagaagtaagatggaagtcgacgaggttttagtttttcggttcgagtggatttagcgttatttggtggtggagttttcggagggcgatggggttttgtgtttggtttgtcgtcgttttatcgtagttattcgcgaacgcgacgttaggcgttattacgaggttgagtacgaatattacgagcggtatgtggcggacggcgagcgcgcggttttggtggagcgtttgcgttagggcgatttgttcgtggttttttttatttttgaagagagagttgttcgtgtaggtttcgggttttgtcgttttttggttttgaagggtcgcggttggggtgagggggattttgtatattagtgtatggaggtgttgttgagagaggtattgttcgagtatgtaagcgttttgtaaggcgttgatttatttttagatattataaggtagaggattttgagtattgataggaatttacgtaattagttttttaatcgagttagggattttaaagtttatttttttgttttggacgattaggtttttgtggtttatgagaattattttttggtttttattcgcggtgtaggttttgagttggaggtgtaagaagattttttgattataattaatttgatttattattttagtgttggtgcgtttatgtcggtaattttagagtttttgtagatagtagggtttagtttgtagagaatggttggattgattacgatttatattttgaggatgattggtgagaatttaggattcgttttatatatgagagaaaaggtcgtaagttttaattgttggaatgttatttattatttaggatttttttatttggaattgttgagtttttatgatgtagatgttaattagattataaatattatattcgaatggatagttttgattaagattagaggcgttaggcgatttgaattttagattttattaacggaatttgaattagagtatggtgaaagggttaatggacgatgtttgaataattggtttaggagagggaaaattttaaaattaatattttttttaagaaaagaaatggaagcgtttttggttttagtaggggtaataatagtttattttttagataaataatggttttgtgattttggttttttggtggatattatggaatattttcgagaatttagtgaagaattacgagttagtaaagtttttgttgttgttgtttttgattatatttgtattttcgaagttaagttgaatttattttaaagatatattgaggaaaaaaatttaatagatttttttgtttttagagaagttgttgatgagttaaaatagtaaaataaggaagatgaaaaaatatttgattttgataggtattaaatggtgatttgtcgtttttaaaaagaatttgagagatattttaaggattttaggtttattaaaaaggatttagaattttttttaaatttatttaattttaaatttgaatatgtatttattttagtgagggtggagttaataaaattttaggtaaatattaatttttggaatgaatatagaattaaagatttggggtagttttatgttggattgtttgttgaattttatttaattattaaaggggttgtttgtaaggtggtatttttgtttgatagtaattaaatttgtgaaaaggtttttttatatttgattcgaaattaatatattttgagttagttattaatagatgagtatttttaagttttgtttcgggttgttataattgaaatggagttcggttgggatgattttgtgagagaaagaaatgaatttaatttataaggttttgtagtataagattgaaaaatttaataagaatttaattttaaaagtaaaaattggtttgagtttttaagtttattaatttggattgtgagaaagtattaagtattagtcgtttaaattgattataattaaaattttgatagttgtttttttttttattttaaatggtagtatgggattgaaatatgagaatgttattttttttaaaatttagtttagtgataaagttattgttttttatgatatagttaattttaaagagatttagtattaatgtgagttgaatttgtagtttgttttttaggtgttttgaagataaatgttaaaaattttagtttttattttaatggagtgttaaaattttgatttatatagttttaaattattaattttttaaatgtgtttttgaattaatttgtagaagtttatatagtaagtttataagtttttaaaaaggaagtttatatataatagtggaggtgttttgtttaattattaaaatgtttgagatttttttttaaatatttttgagttcgaaggtaatattgatagatttttttttttttttttttttattatttattttagtgataatatattattgatagaggaagttattagaattatttttaagttttagatataggagattttatgtaatttggagataagattaattattgggggttttttttggattttttttttaataattgggggttattttattagtttgtttattaaaggattatggtaagtatagaattttaatggttgttagttagtaattttttttttttttttttttattgtagatataagtttggttttattaaaaacgatgaggaaaaaagattgtattttaggattaggaggtgtgagatattttagtttttttgttttatttgcgtgggtattgttgttttattttaaaaaattttgtttaaagtaaatattttgttttaaaatgatatagtattagattttgttagatgttagaaatggatttattttaaaatttggaattgtcgtatatattttatatgtaagatagtatataagtagaaatatttaaaagtagttttatttatagattgtagtaattttgtatttttattaagataatttgttttgtgttaaaatagtaatttttaaatttttgtttattatgaaaaggtaattttaaagtttattatgtaaaattaattataaataggatttaatttatatttatagatttttttaagtattatataatttaaaaatttttgttttaaagttttgttttaattattgaaatattttaatttgtggttattaatttagtaaatttaaggaattaggttatgattaagaatttaggtggaattgatgtttgggtaattaaaataaatggtataagagtttaaaaattaaagttgtgttagtggtttttaattagaggtagtaatttgttattttagaggatgttgagaaatgtgtaggggtatttttttggttgttatatttattaggggtttttgttggtatttaagtttaaagatatttatttttgtagtgtatgggatagtttggtataatgaagaattagtttttttaaaatgtagattattttattttaagggatagggtagattattattagaagtaaaattaaaagtataagttgggtaaattgatagaatattagataggagagattaattttaattttttaaatttggttagtaaagtgtaataaaggtattgataagttttgttagtttattatagtatttgtaaattaggaattaataattgaattagatttaagggttttgttttgttatatatatttaaggtagaaaaaaagttatatgtcgattaggtatttattaagaatggttaagttgagattttggttaatagagtaagtttatatatttagagaaataatatagtggaaaatcgaaaaaaaaaaatagaaaaatttatcggtaattttttaatagttttgaatatttatagtagagttttattatttgagagaaagattggaagatttgaaagttatttttgttttttaattttagttttttaaatattgaaattttgtatattttgtgaaattttagtatgttttgtttaaggtgttaataaaattagtttgtattatgtagttattgagtgagggggagatataagttaaggattttaaattgatttttagttatagagaatttgttataagttagttttgtttgtaaaaaaaaaaaaaaaaaaagaaaaagaaaaaagtgtattttattgttttttgtattaagtaattttgtaattgtatggtagtttttttttttttaaataaatatagttgttattggttttgttgtagtagtgaatatagttaaaatacgtatattaaaaaaaaaattattaggtttttattagttattgttttatagtttatttttattagtttttttgatagatttgtatttttagtgtttcgtattgttatttaaattgttttattatgttaagtttttgttaatagttttattttttttgaaatatttgaatatttgatgattttagttttgaggagatattatttttaggtgtgtttttttagtttttgtaggtattttttttttttaatatttgtttttcgtatttttaaaaaaatttgttttagattgttttgttttgtgttagttcgttagttgattttatttttttttatgg

SEQ ID NO: 27 - DNA, 6246 bp, Artificial Sequence
  chemically treated genomic DNA (Homo sapiens)
ttttgtatatttgtattttatataataatattttgtgtaatttttttttaaatgtagaatattgatattggagaatgttttttatatattttaagtgaaaaaggagtaaaaattatataatgtattattttatttttttaataaaatgtaaatgtgtatagtaaagatatagaggtgttatagtgttagggaaaaggggtgtaagattagtgtttgttttttattttttgttttgtttataaattttttatattaaaaatataaattttaaatgaaaataatggaataaatataaatttttattttataattaattaaaatgatagtaattgaattttttaaagttttaaatttattaaaatgggagaaatggatgatagtattagcgtttgaaaggtggaaagtggagggacggtgggtagattatttggttgatttaagaaaattgaattttaggttagttgagatttatgttgatttatagaattttaagaatgtttaggaattgggagaagattaaggatattagaagagaagggggtgaaaataaggaaagttgttgaaatttagtttaagaaatagttagatatttatttttgtttattaaagtcgagtgatttttttgtagtagggtttttttcggataggatatttggattaagaaatattagatatagtagagggcggtcgaaatatgttgaaattaggaatagttaatagatgttgaggtttttattttagttttttttttatttttgttgttggaatgttggagatagggagaattttttttgcgcgagttgatttgtttgttaaaaaaacgataaagaaattgttataggaggttttttaagtgaaaatagttagttatttgttttataggaaatagtttttttttatataattatttttagagatttttgttttaatatgtgtaggtaatttaggattatttaacgtgtaaggaaagtttataagatggaaaaaaaattttttttgaggtagggtttggttttgttatttaggttggagtgaagtggtgtgattataatttattgtagtttcgatttttgagtttaagtgatgtttttatatagttttttaagtagttgggattataggtatgtataattatgtttggttaagttttttttatgttttgtagaagtaaagtttttttatgttttttaggttggtgttaaatttttgggtttaagcgatcggttttttaaagtgttggaattataggggtgagttatcgcgtttagtttaaaataattttttaaagaaaatttgtagaaaataaagattatgtatgaaaaaggaaatttagaagatattaatgaaataagaatatagtgttgttagcgtgtatgtgtatatgcgtatatatatataaagaattaaatatttttaggaagataaagttatgagaatattttagagaagagaaattttttaaatggaaaatagaataaaaagaaaattaaaggataagtttaagaggtatatagttaaaaaaaatggtagttttaataagagagaataaagaagaaaagttataaaatgttttaatttaagtgtgaatataaaaatatattatttttatagtaagtgagaaaaatagggtgtaaaaggtgtatatgatgttattttatatgtagggataagggaaaataagattatatatttatagttgtttgtatttatataaattaataggatattaaaaaaaaaaaaaaataatatttaagaaaaatagttatttgtgagggaaggtggagattttattgaattttttatatatatagttgatttttgaatagtaggttttgaattgtatagatttatttatttacggatttttttttgtttttgttatttttgagatgataagatcgattttttttttttttttttttcggtttgtttaacgtgaagatagtgacgttgaagatttttgtgatgttttatttttatttaatgaataggaaatatatttttttttttttttttgtgatttttttaataatttttttttttttttttttttttttttaagacggagttttatattgtcgtttaggtttaagtgtagtggcgcgatttcggtttattgtaagtttcgtttttcgggtttacgttatttttttgttttagttttttgggtagttgggattataggcgtttattattacgttcggttaatttttttgtatttttagtagagacggggttttatcgtgttagttaggatggttttaattttttgatttcgtgattcgtttatttcggttttttaaagtgttgggattataggcgtgagttatcgcgttcggtttataaataatttttaaaagatagtaagggatatagtagggtagtaagtgttttatttataagaggagtagtaatgttagaggtttatagagtacggatttttagcgttgtcgttttatataattagtttttttgatttttaaaattatttgtattcgtaatttttttaaaaataaaaatttaaaaaattaaatttttttatttataaaaataatttttttaggttttattttttttgattgggtattatgtttttgttaacggagatttagagtttagagaaattcgaaaaagtaattttagtttttttaggatgagttggtcgggaggaagggaggttttaattttagcgtttcggggttagagtaaagcgaagaggttttttatggttataagcgggcggtttacgtagcgtattgtaggtaggtgcgagttatatgcgttaagtgttcggagcggttttttggtagttagtgttaattaaaattattcgtacgggagtggattttcgttgataatttagaaataagtaatagattttttgatgtagttatttgtgtcgcgttttttcgtatcgttcgttacgttttggtttttggagattattttttagggtaggggttgtcgttcggtcgggttcgcggggtttttcggtttgatatggtcggtgttggagcggtacgtgcgcgtttcggtttttcggtcgttttcgtttttcgtcggtgcgtatcggcgttcggggagtcgttggttcgggtgtttagtcggtttttgttttgtttggcgttcggatcgttatttttgtcgttttttcgttagttttcgtagtttttagattggtcggtttgcgcgtttatttttgtttttcggatcggttatcgtcggaggtcgcggaggagggttcggtcgcgtagatttcgtttatcgggtttatttttcgttatataaggttatttttttattttcgcgggttatcgtcgtcgtaatcgtcgcgttagcgtttttttttacgcgcgggggcgtttttgtttatcgttttcggtagggtttttggtggttatgggggataaggggcgttgatttattcgggcggggtttcgggagttgtatagattaaggtagtttttcgtttttttttttattacggagattttgtgggagatgtcgtgggttttttattatagattaggaaataggttcgtagaggggttatacggttaagtagcggtattttaggtattgggggttttcgaggggaaggggtagatttttgggagttagagttagtagttgggttgggaagtttcgagtgtggatagagagggtgggaatgacgttttttgtgggaagagagggtgggtaagtttgggatgtttttgagcgggaatttagtatgttttgtgaggagggttataagtatatttttgtgaggaggttgagttttatcgaggataggacggagggagtttgagtaggtagagagggggtttggggaggcgttggttcggggaggaagtgggtaggggagaaattttgatattaatatttaataggtaaatgtcgtggtttttgttgtgggggtttttggaggatttttaggaaaacgagggaagagtaggaaaaggcgatatggttgtaggggttaagtttaggagtcgttttttatagtatttattttgtagaagggaaatttgaggtttttagacggtaggggttgattttgtagagattggtgagtaaaggggattattttaagttttagtggtattaggaatatttataatttttgatttggattaaggttgttagtttggtttagttaagagttttttagaaggatggtttatatattttaaattaaaggggttagatacgtgtatattatttttagttattttggaagttgaggtggggggatcgtttgagtttgggagttggaggttagtttaggtaggtaatatagtgagattttatttttaaaaaaataaaataaaataaaataaaaaaatattaaaaaagtttttagaaagatttttgaatttttttggattttttagtggagatttggaaatttgaattttgataattttttttatagtggggttaaggaggaattaggtaagttaaaagaagtgaattttatttttttattgtttgtttgaattttgtatttaagtaagtgttatttaagtaatttaagagattggtttatcgaaaaaataaaattttttaaatttttatagttggtagattgtggttatagttatagtgtattaagattatttgtttagtatttttggtgatttaaaagggtttgaggataggagtttagagttgggttagttgtttaggtatttagggttgttataggtaaaattgttggaatttagggtagtattgtaaatgttacgtcgtttttagggttttttgtttgtcgttggaattaaatttatttagattttggaaattttgttttggattttttttaataagtttatgagaaattaaatttttttttttatgcgatattggattttttataaagtaaaattaagatgagtaaagatgtggtttttagatagtgtttgaaaaagtagagattatggtgttaggcgttattatttgggtttataaaagttgttataagacgttaaggttataagttatttagtttatgtattcgttttttaatttttttttgttggtattgggttttatggcgtttttgttgattacggttattgtttttatttgttttggcggttttgtttttttaggttttgtgtttttttttatagtttttagggagtttattgaggagttggttaatattatttagaattagaaggtgagtgtcggttagttagggttttagttatgagggttttagggtgggtgatttttaagatgaggttatgagtaggttgggtttggttttaagatgtttgtaggttaggaaaaatttttatggattaaggttcggtttagttatgagggagagaggagttgggttggggggtttagtattgtggatggatttatggaggtgtttggtagattttttagggattatttgtttttttggtttggttttgtttgttattgttagtttttatttagttatttttgaatagaggatagtagagaagggttagtatttttttagaattatgtggtatttgttaattggattttgattataataatgtagttattttttttagtattattataggttcgtttttataggaggattttttagtagagttcgttttttgttttattagtaatagtttatatgtttgagtattgtttatattaggtttggtgtacgtgttttatgtgttattttattattgttagttattttaagaggtaggtacgatgaatttattttgttaaggtttagtgaggttaagtgatagaggttggatttaagttaggtttggttaatattagagtgtttatgtttttaattgtagtgtttttttattattagaaggtagggtatttaatatattagatttttatcgttttttatttgatttgttttggttaatagtggtttaggttatttttattttattcgtttttattttggtttttttcgtaggtttttgtttttttgttttgattatggtaagttttgtatgtagtttgttttttattagtggtgttaattttttttttttagttttaagattttaaatagtgggattttatttttatgtttgttgtttaaagtagaaaacgaagtttaggaatgttgaggggttgttaggtttgtttttgtgttatattagggatgtttgtggggtttgtgttggggtagatttggtttgggttgttagggtaggtttataatttttgttagtattttgtttattgttattttgtttttatagg

SEQ ID NO: 28 - DNA, 6246 bp, Artificial Sequence
  chemically treated genomic DNA (Homo sapiens)
tttgtgggagtaaagtgatagtgagtagagtgttggtaggggttgtgggtttgttttggtagtttaggttaggtttgttttagtataggttttataagtatttttggtgtggtatagaggtaggtttggtagttttttagtatttttgagtttcgttttttgttttgaatagtaggtataggggtgaggttttattgtttagggttttggagttgagagaaaaaaattgatattattagtaagggataagttgtatgtaaggtttgttatagttagggtaggaggataggggtttgcgggaagggttagggtggggacgagtgaagtaggagtggtttgggttattgttgattaagataaattagatgggaggcggtggggatttggtgtattaaatgttttgttttttgatggtgagggaatattgtagttaggagtatggatattttggtgttggttaggtttggtttgaatttagtttttgttatttaattttattgaattttagtagaatgggtttatcgtatttgttttttgaggtggttggtagtgatgaaatgatatataaagtacgtgtattaggtttggtgtaagtagtgtttagatatgtgagttgttattagtggggtaaggagcggattttattaaggaatttttttgtaagggcgggtttatgatggtgttggggagaatggttgtattgttatggttaaaatttagttggtaaatgttatatggttttgggagggtgttggtttttttttgttgttttttgtttaggaatggttgagtaggagttggtagtggtagataaggttaggttaggagagtaggtagtttttggggagtttgttagatatttttataggtttatttatagtgttgagttttttagtttagttttttttttttttatggttgggtcgggttttggtttatggagattttttttgatttataggtattttaggattaggtttagtttgtttatgattttattttgggaattatttattttggagtttttatagttaggattttggttagtcgatatttattttttggttttgggtgatgttgattagttttttaatgagttttttgagggttgtagagggaggtatagggtttggggaggtaaagtcgttaaggtaagtgagagtaatgatcgtggttaataaaagcgttatgaggtttagtgttaataggagaggattgaggagcggatgtataggttgggtggtttgtggttttggcgttttgtggtagtttttataggtttaagtggtgacgtttgatattatggtttttgtttttttaggtattatttagaaattatatttttatttattttgattttattttgtggaaaatttagtgtcgtataaaggaaagagtttgattttttatggatttattgagaagggtttagggtagagtttttaagatttgggtgggtttaattttagcggtaggtaaggggttttgagagcggcgtggtatttgtaatgttgttttgagttttagtagttttgtttgtgataattttgagtatttggatagttgatttaattttgagtttttgtttttagatttttttgggttattagaagtgttgagtagatagttttagtgtattgtggttgtgattatagtttattagttatgggaatttggggagttttattttttcgatgaattagttttttaaattatttaagtaatatttgtttggatataaaatttaaataggtaatagaagagtaaagtttattttttttggtttgtttaatttttttttggttttattgtgagagggattgttaaagtttagatttttaggtttttattgagagatttagaaagatttagaggtttttttgggagtttttttggtgtttttttgttttgttttgttttgtttttttggagatggggttttattatgttgtttgtttaggttggtttttaatttttagatttaagcgatttttttattttagtttttagagtggttggaagtagtgtgtacgtgtttggtttttttaatttaaagtgtatgggttatttttttgggaaatttttaattgggttaggttggtagttttagtttaggttagagattgtaagtgtttttagtgttattggggtttggggtgattttttttgtttattagtttttgtaggattaatttttgtcgtttgggggttttaaattttttttttgtagaatgagtgttgtggagggcggtttttgggtttggtttttgtagttatgtcgtttttttttgtttttttttcgtttttttagaagttttttagaaatttttatagtagaggttacggtatttgtttgttgggtgttgatgttaagattttttttttatttatttttttttcgaattagcgtttttttaggttttttttttgtttgtttaggtttttttcgttttgttttcgatggggtttaatttttttataagggtgtgtttgtgattttttttataaggtatgttggattttcgtttagaggtattttaggtttgtttattttttttttttatagggaacgttatttttattttttttgtttatattcgaagttttttagtttagttgttggttttgatttttagaagtttgtttttttttttcgagggtttttagtgtttggagtgtcgttatttggtcgtgtgatttttttacgggtttgttttttaatttgtagtagagggtttacggtattttttatagggttttcgtgatgggggaaggagcggggaattattttggtttgtgtaattttcggagtttcgttcgggtgagttaacgttttttattttttatggttattaaaagttttgtcgggagcggtgggtaggggcgttttcgcgcgtgggagaaggcgttggcgcggcggttgcggcggcgatggttcgcggagataggggggtggttttatgtaacgggagatgggttcgataagcgggatttgcgcggtcgggttttttttcgcggttttcggcggtggtcggttcgggaggtaggggtgggcgcgtagatcggttagtttggaagttgcggaggttggcgagggggcggtaaaggtggcggttcgagcgttaggtagggtaagggtcggttggatattcgggttagcggtttttcgagcgtcggtgcgtatcggcgaggggcgggagcggtcgaggggtcgaggcgcgtacgtgtcgttttagtatcggttatgttaggtcgagggatttcgcgggttcggtcgagcggtagtttttgttttggagggtggtttttagggattaaggcgtggcgggcggtgcggagaggcgcggtatagatggttatattagagggtttgttgtttgtttttagattgttagcggggatttattttcgtgcgggtaattttaattaatattaattattaaagggtcgtttcgggtatttggcgtatgtggttcgtatttgtttgtaatgcgttgcgtgggtcgttcgtttatggttatggggagttttttcgttttgttttggtttcgaagcgttgggattgggatttttttttttttcgattagtttattttgggaaagttggggttgttttttcgggtttttttggattttgggttttcgttggtaaagatatgatgtttagttaggaggagtaaggtttgagagagttgtttttgtaagtgaaaggatttaattttttagatttttatttttaggaaagttacgaatgtagataattttaaaaattaagaaggttgattatgtaaaacggtagcgttgggaattcgtgttttatgggtttttggtattgttgttttttttgtgagtgaggtatttattgttttgttgtgttttttattgttttttaaaggttgtttataggtcgggcgcggtggtttacgtttgtaattttagtattttgggaggtcgagatgggcggattacgaggttaggagattgagattattttggttaatacggtgaaatttcgtttttattaaaaatataaaaaaattagtcgggcgtggtggtgggcgtttgtagttttagttatttaggaggttgaggtaggagaatggcgtgaattcgggaggcggagtttgtagtgagtcgaaatcgcgttattgtatttaagtttgggcgatagtgtgagatttcgttttaaaaaaaaaaaaaaaaaaaaaaaaaggttgttaagaaaattataaggaaggaggaaaaaatatattttttatttattaagtggaggtggaatattataaaggtttttagcgttattgtttttacgttgagtaggtcgaggaggaagaagaggaggggtcggttttgttattttaggggtggtagaggtaggagagaattcgtggataagtggatttgtgtagtttagaatttgttgtttaagggttaattgtgtatgtaaaaaatttagtggaatttttatttttttttataagtaattattttttttaggtgttgtttttttttttttttggtattttattagtttatgtaaatataagtaattgtgaatatatggttttatttttttttgtttttatatgtgaagtggtattatatatattttttgtattttgttttttttatttattataaaaataatatatttttgtatttatatttagattgggatattttatgattttttttttttgtttttttttattggaattgttattttttttgattatatattttttggatttgttttttaattttttttttattttattttttatttaaaaaattttttttttttgggatatttttatagttttatttttttgagggtatttgattttttgtgtgtgtgtgcgtatgtgtatatgtacgttaatagtattatgtttttgttttattgatattttttaagtttttttttttatatataatttttattttttgtaagttttttttaaaaaattgttttgaattgggcgcggtggtttatttttgtaattttagtattttggggggtcgatcgtttgagtttaggagtttgatattagtttgggaaatatagggagattttatttttataaaatataaaaaaaatttagttaggtatggttgtgtatatttgtgattttagttatttgggaggttgtgtgggagtattatttgagtttaggagtcgaagttgtagtgagttgtgattatattattttattttagtttgggtgatagagttagattttgttttaaaaaaaattttttttttattttataggttttttttgtacgttaggtaattttggattgtttgtatatgttaaaatagggatttttgagggtaattgtgtgggagggggttgttttttatagggtaggtggttgattgtttttatttggggaattttttgtggtagtttttttgtcgtttttttggtaggtaggttagttcgcgtagaaaagattttttttgtttttagtattttagtagtaagggtggagagagggttggggtgggggttttagtatttgttgattgtttttgattttagtatatttcgatcgttttttattgtgtttagtgttttttggtttagatattttattcggagaaaattttgttgtaggagagttattcgattttgatgaataaaaatggatatttaattgttttttaaattgagttttaataattttttttatttttattttttttttttttgatgtttttggtttttttttagtttttgagtatttttgggattttgtaaattaatataggttttagttggtttaggatttagtttttttgggttagttaagtagtttgtttatcgtttttttattttttattttttaaacgttggtgttgttatttattttttttattttggtgggtttaaaattttagaaaatttagttattgttattttagttggttataaagtgggagtttgtgtttattttattgtttttatttggaatttatatttttaatgtagagaatttataaataagataagaaataagaggtaaatattagttttgtattttttttttttggtattataatatttttgtatttttgttatgtatatttatattttgttagaaaaatgagataatatattatatagtttttattttttttttatttaaaatatatgaagagtattttttaatgttagtattttgtatttaaaaaaagattatataaaatgttattgtgtaaagtatagatatgtaaaa

SEQ ID NO: 29 - DNA, 6894 bp, Artificial Sequence
  chemically treated genomic DNA (Homo sapiens)
gatagtttttattattagaatttagagtttaggagtatagttttatattggttttttttaaagtttggattataggattgttttttagaaaagtttgaaagtttttggtaaatagtatttagttatttagttttttttttttagtttttttttagaagagtaattcgagaaaatatttagtagcgtagaggaaagcggtatagtgttgttaatttatttttagtaagatttacggaattttaaaaatatagtttatgggttttaggacgtttgtagttttgttgtttaaaggttttttgtagtattaattttttttttaaattataagtggtgtttataggttttgttgttttttaaattttagagagatttttttttaaatgaaatttagagaatagaaagatttaaaattattttgatttggttagatatagaggtttaagattgttaagttattttgtgtttatttttttattaaagttattaaaatttttttattaaatgaatatttatggaagcgttaagattaattatttttggagttaaatagattttgatttaaattttagttgtgtaatataaagtttgtgggattttagatcggttttttggtttttgggttttaattttttaggggtgagttagattaggggtgagttagagagaataggatttttttgtattgttaataagaggattaaaatgagatttattatgtatagtataggatataagattagttggtatataataagaatttaatatataatagagttttttttttatttttggagtttttaaaaaatataaaaattatatatattttttttggttaaagatgatgattaatataaaaattttattttaggtttatgttttttggattttttaaagagtatttaatagagtgagttatatttggggttatatttgagttattcggggttatgtttttgtgttttgtgatgttgttaattcgatgatttgtgcgttttttttagttaaaaaataaaagtcggttttgtttttttttgtagttttttgaatagttataattattttaattgtttgttttgtttgttaagatttacgtttttaggtaaacgaattaattaagtttttttttgggtatagattataaagttatgaaaaatttgttttttttttttttttttatttattattttatttttgttttttggggagtattgtagagttagagttttttaagattttgtttattgtaagtttaaggtgatggagtttggttttcgggttaggagttaattttagaggttttaataatataagaaagaatgagatttaaagattattttgttaggtgggatggtttatatttgtaatttttagtgttttgggaagttaaagtgggaggatgttttgagtttaggagtttgagataggttttaatagggtatggatagaggaaagtagtatggaattgaagggtggatatttattgtttagtaaattataaattttggaaggaggtggaagggttttagatttgtgttgtttgtagtgaagaaattaagatataaaaaagtaaatgggagaggatagtagacggttttgaatggatgagagttagatatatggtaggtgtagatttttatttaagttttttaagttaaagatattgttgaaatatttggattattgacgttattttatagtaggtttttgtgaagtttaaatggagtgagttttgttttttttaattgttatttagtgtgttttataggtaatttttaagtaggaataataggagtatagtaatgtagtagaatttataaattttatttggtattgagaaaggttaagtcgagaggaaagtgattgttgttaattttattgtagtttgtgttggagtagggggtgttgtgtttggttttttgtatttgttgttattatttttgttatttgtgaaaggagtgtgatatggtggttataaggcgggttttgttgtattttttttagattgtggttttgggcgtttgtttaatttttttggggtagttttttttgggggttgagtgagtgaatgtatttggagaattaggtggtgtttatggtatgttgagtatttataaaggttattaattcgtgttattggttttttaattaagaatggggttatatattatttgtagtttttattattagtttggtagtatttataaacgtgtagtagtaatgtttgattggtggttttttgaagggattttatgggtatattgtgtatttgtttaaatttagggttttttatggatttataggattggtagttgtaggttagtaatgtatagtaattgaagttgggtttttaaattatttgtttttaaaaaaatattataattatttttaatatgtttttttttttttatgaattttattattaaatgtatttgaaattggaaatatatattaattttgattatatttaatggatttatgagatgggagtatttgttttagtagagtttttatatatggtttatgttggttataggtgttggtttttgtattaattaggattttgaagaggaaaataaatagtaggagatgggtagagatataaaagatttattataaggaattggtatatatagttatggggttgcgtagttttaagttttatatttagtaagttggagatttaggagagtagatgatgtgttttggtttgaaagttagtagacgtgagatttaagaggagtttatatttttgtgttagttcgaaggtaggaagagattagtgtttttattaggtagttaggtaggaggagttttttaggtcgtcgaggagttggtttgttatttttaggttttttgttgattggataaggtttttttttattttagagggtttttgttttatttagtaatttgtttaaatgtgtattttatttagaaatatttttagatatatttagaatattgttttattatatatttggtattttgaaatttagttaggttgaaatatgaatattaattattataggtttttttttattatcgatgtttttttagtaggtggggtatagtatataggattttttttatttttgaggtttttttagtaggtgggatatagtatataggttttttttgttattttcgaggtttttttagtaggtgggatatagtatataggttttttttgttatttttgaggtttttttagtaggtgggatatagtatataggtttttttttatttttgaggtttttttagtaggtgggatatagtatataggtttttttttttattttcgaggtttttttagtaggtgggatatagtatataggtttttttttttattttcgaggtttttttagtaggtgggatatagtatataggttttttcgggtttgggtaggaggtacgaaggtgatttatttttgtttgtttaggattgaggtggtttttgagatgtagaatttttggtttttaaattttgtttatgttttaggtaaataaggtaaattggttattttaggtagaatttttatagtagttacgttttgttaatttttttttttcgtatttatcggatttataaatttttttttgaatatttgatttttgatttaattttttttaaggtaattagtttttttttagataagtttttagagtgaggtcgtgatgggtttttcgtggattttagattataggttgtgtttttaaatttgttttttttaggaagtgtttttttcgttacgtggtgttggttttttttattggtgtattgtcgtagttcgtttttattttagagatatagaaaataagaagtttttagaaatgttagttttaggagttttatttttgaaatagaagtgttgacgtttattgtatagttatttttgggaatgatatattagtatttttatcgttattttataggttgtggggttaggtagtgatttagggagacgagtagtgagaaggaatggattaaatatttttcgagtttatcgagtttagttatcgttttttagttagagaaggtagttgtgggtttttttgtttttatatggatttttttttgttttatttttttttttattaagggtatcgttgttgtttatttgtttattttatatttacgtgtgtttacgagaaggatgggagggaaagtggggcggtaaagaataatttttgttattatttttcggtttaaaattttattaaagtttttttttataaagtgtttaagatgagggtttagtatattattttatttaaattataatattttatatatatttttataaatgtaaggggtataaaagtgttattttgttatatggatatatcgtgtagtggtgaagtttgggtttttagtgtatttgttattagaataatatacgtgttatttatagggtaattttttattattcgtttttttttattttttcgagtttttaatgtttattttatattttatatttacgtgtatgtattatttagtttttatatataagtgagaatatgtagtatttgattttttttttttgagttattttattttgataatggtttttatttttatttatgttgttgtaaaagatatgattttattttttttgatagttggggagtattttattgtgtatatgtattatattttttttatttatttatttattgatgaatattttagttgattttatatttttgttattgttattagtgttgtaataaatatatatgtgtaggttttttttaatatattgatttttttatattttatggagggaatagagtttttttaagcgagtgtggttggtttttattttttagtgtattttgtaattaatatttttgtatatttttttttaggtgattgggagattttaatttagatttttagtaagtgttataaggaagaaaagattttgaagaattaattaagtttttcgtgaagttaagtttaagtaatattttcgttttaattataagtaggagaaatgaagtatattattaattcgtatgaaaatattaataatatagtaagaaataatttcgattgttttcgtgtggttttgtcggaggagatattttttataatttttattgttggagttttggagaatttgatcgttttgttggttgtgtttaagaataagaatttttaggtatttatgtatttttttatttgtagtttggttatatttgatatgttgggtagtttatataagattttggaaaatattttgattatattgagaaatatgggttattttaagttacgtggtagttttgaaattatagtcgatgatattatcgattttttgtttgttttttttttgtttggttttatttttagtttgtttgtgattgttgcggatcgttatattattattttttacgtattgcggtattatagtatcgtgattatgcgtcgtattgtggtggtgtttacggttatttggacgttttgtacggggattggtattattatggtgatttttttttattatgtgtttatagtgattatttttacgtcgttgttttcgttgatgttggtttttattttgtgtttttatgtgtatatgtttttgttggttcgattttatattaggaagatttttattttttttagagttaatatgaaaggggttattatattgattattttgttcggggtttttattttttgttgggttttttttgtgttttatgtttttttgatgatattttgtttaagtaatttttattgcgtttgttatatgttttttttttaggtgaacggtatgttgattatgtgtaatgtcgttattgatttttttatatatgtttttcggagtttagagtttagggacgtatttaaaaagatgattttttgtagtaggtattggtagaatggttgatttttggttttagaatttatgggaataacgttgttaagtgttagaatagtgtaatattttaataaatgttagtgttttttattggttttttttttttaatggatgtaaggatgattttattagttagtgtttttaatagttaggttttatgtgaatagttttattgtaggggtaattttttaattttgtgattggatagataaaacgatgtagtaaaagaaggatagaatataaagtattaggtaggtataaaagtaattaaggtttttgttattatttttaatgattaaaaattgtaattatttttgtattaatttagtaaaatagtaataaaaatttaagggttttgggttaaggtaaagatttgtttttttgtggatatttaataagttagttttgaggtggtttttttaggtggaggttattgtagttaatttttagaagttaagtatttggatatgcgattttaggtagaagatgtagggtttttgtaagttaataataaattggaaggaatgtattgttgtagttgaatttgtttgttttttatagttatgtggaatttttatttttttttttttttttgttagtttgatgtattgatgttattttagttttagaaagtaggttgagtataaattataaatgttaaataacgagtttcgagtttttaatgataaatggattttttttgttagttttttttgtttatttagtattttattggttttaaaatttttttttgttatatttttttatgttttatgagtatatattttaaaggaagaaatgaaaatttaatttatttagtttttatgtgggaatatataaaggttagatgaaaattgttattatttgaagaagttgtaattaaattatgtgtgttataatgtagaagtataagaaaagagttttaatatgtattttaagaaataaagagagagagatagagatagatagagagagagagagagagagagagagagagtgt

SEQ ID NO: 30 - DNA, 6894 bp, Artificial Sequence
  chemically treated genomic DNA (Homo sapiens)
atattttttttttttttttttttttttttttttgtttgtttttgtttttttttttttattttttaaaatatatgttggggttttttttttgtatttttatattgtaatatatatagtttggttatagtttttttaaatagtgataatttttatttggtttttatgtatttttatatgggaattaaatggattaaatttttatttttttttttgaaatgtatgtttataaagtatgaggaaatgtaataggaaagggttttaaggttagtgggatattgagtgagtaaagaagattaatagagaaggtttatttattattggaaattcgaagttcgttatttgatatttatagtttatatttagtttattttttgaaattgaggtggtattaatatattagattaatagggagaaagaggagggtggagattttatatggttgtgggagatagataaatttagttgtagtaatgtattttttttaatttattattggtttatagagattttatattttttgtttggagtcgtatgtttaggtatttaatttttggaaattggttgtaatggtttttatttggaaaggttattttagaattggtttgttagatgtttataggaaagtaagtttttgttttagtttaaagtttttgaatttttattgttgttttattagattggtgtaaaagtaattgtaatttttggttattgaaagtaatggtaaaaattttaattatttttgtatttatttaatattttgtattttattttttttttattatatcgttttatttgtttagttataaagttaagaggttgtttttataataagattgtttatatagaatttagttattagaaatattagttggtgggattatttttgtatttattagggaaggaaggttagtgaggagtattggtatttgttggaatgttatattattttggtatttggtaacgttatttttatggattttaaaattagggattagttattttattagtatttgttgtagaagattatttttttgaatgcgtttttgagttttgggtttcggaaggtatatatgaaggggttaatgacggtattgtatatgattaatatgtcgtttatttggaagagagatatgtagtaggcgtagtaggggttatttgggtagaatgttattaagaggatatgaagtataaagggggtttagtagaagatgaagatttcgagtaggatggttagtgtgatggttttttttatgttggttttggggagggtggagatttttttggtgtgggatcgagttagtaggaatatgtgtatatagaggtataggatgaagattagtattagcgggaatagcgacgtgaaggtgattattgtgggtatatgatgggagaagattattatggtgatgttagttttcgtgtagaacgtttagatgatcgtaagtattattatagtgcggcgtatggttacgatgttgtggtatcgtagtgcgtggaagatggtgatgtagcggttcgtagtaattatagataggttgaagatggagttaagtagggagaggataaatagggagtcgatgatgttatcggttgtggttttaaaattgttacgtggtttgagatagtttatgttttttaatatgattaggatattttttaagattttatataggttgtttagtatattagatatggttaagttatagatgaaaaagtatatgggtgtttggagatttttatttttgaatatagttagtaggacgattagattttttaaaattttaataatggaaattgtgaaaaatatttttttcggtaaaattatacgaggatagtcggaattattttttgttgtgttgttgatgtttttatacgagttgataatgtgttttattttttttgtttgtggttaaggcggggatgttatttggatttgattttacggaaaatttgattgattttttaggatttttttttttttgtagtatttgttggagatttaagttaaaattttttaattatttaaaagggagtatatagaaatattagttgtaaagtatattagaaaataaaaattagttatattcgtttaaagaaattttattttttttataaaatataaagaaattagtatattagaaggagtttgtatatgtatgtttattgtagtattagtgataatagtaaagatatggaattaattaaagtgtttattaatgggtgaatggataaagaaaatgtggtatatatatataatggagtattttttagttattaaaaagaataaggttatgttttttgtagtaatatggatggaagtggaggttattattaaagtgaaataatttagaaagaggaagttaaatattatatgtttttatttatatgtgggagttaaataatgtatatacgtggatatagagtgtggaatggatattggagattcggaagggtgggagggggcgggtgatgagaaattattttatgggtaatacgtatgttattttgatgatagatatattaaaagtttaggttttattattatacggtatatttatgtaataaaatggtatttttgtattttttatatttataaaaatatatataaagtgttgtaatttaggtaaaataatatattgggtttttattttaagtattttgtgagaaaaagttttagtggaattttgagtcgagagatgatagtaaagattattttttgtcgttttatttttttttttatttttttcgtgaatatacgtgagtgtgggatgaatagatgaatagtagcggtgtttttgatgaaaaaagaggtaaagtaaggaaaggtttatgtgggagtaggagagtttatagttgttttttttgattgggaggcggtggttgggttcggtggattcgggagatgtttagtttatttttttttattgttcgtttttttgggttattgtttgattttatagtttgtgggataacggtaaaggtgttgatgtattatttttaaagatgattatataatgagcgttagtatttttgttttaaaggtggagtttttgggattggtatttttggagattttttattttttgtgtttttggggtgaaggcggattgcggtagtgtattagtggggaaagttagtattacgtggcgaggaagatattttttagggaggataaatttgggagtatagtttatgatttgaagtttacggggagtttattacggttttattttagggatttgtttggaaaggaattaattattttggaaaggattgggttagaggttaagtgtttagaaggaggtttgtgggttcggtggatgcggaaggaaggggttgatagggcgtagttgttgtgagggttttgtttggaatggttaatttattttgtttgtttgaaatatggatagggtttaaaagttagaagttttgtattttaggaattattttagttttgggtagatagggatgagttattttcgtgttttttgtttaggttcggggaagtttgtgtgttgtgttttatttgttggggaagtttcggggatgggaggggaagtttgtgtgttgtgttttatttgttggggaagtttcggggatgggaggggaagtttgtgtgttgtgttttatttgttggggaagttttagggatgggagggggtttgtgtgttgtgttttatttgttgggaaagttttagggatggtaggggaagtttgtgtgttgtgttttatttgttggggaagtttcggggatggtaggggaagtttgtgtgttgtgttttatttgttggggaagttttagggatgggaggggttttgtgtgttgtgttttatttgttggggaagtatcggtgatgggagggggtttgtggtggttggtgtttatgttttagtttgattgagttttagggtgttaggtatgtggtgagatagtgttttaggtgtgtttgagggtgtttttgggtgagatgtatatttgaataggttattgagtaaaatagaggttttttgggatgggggagggttttgtttaattagtagaaagtttgaggataatagattagtttttcgacgatttggggggttttttttgtttgattgtttgatggagatattggtttttttttgttttcggattagtatagaagtgtgagttttttttaggttttacgtttgttggtttttagattagaatatattatttatttttttgggtttttagtttgttgagtgtagagtttgggattgcgtagttttataattgtgtgtgttaattttttatagtaaattttttatgtttttatttattttttgttgtttatttttttttttagaattttggttaatataggggttaatatttgtggttagtatgggttatgtatggagattttgttgggatagatatttttattttatgagtttattaaatgtaattagaattagtatatatttttaattttagatgtatttgatggtaaaatttataaaaaaaaaaagatatgttgaaagtggttgtaatatttttttagaaataggtggtttgggagtttagttttagttgttgtgtattgttgatttgtagttgttaattttataaatttatggggagttttgaatttggatagatatatagtgtgtttatggggtttttttaaaaggttattaattaagtattgttattgtacgtttgtggatgttgttaagttggtggtgggggttgtaggtggtgtgtggttttatttttggttgaagggttagtgatacgaattggtggtttttatgagtgtttagtatgttatgggtattatttaattttttagatgtatttatttatttaatttttagaggaagttattttagaaaggttgggtaaacgtttaaagttatagtttggagaggatatagtagagttcgttttgtgattattatgttatattttttttataagtggtaagggtaataataatagatgtaagagattagatatagtattttttattttaatataaattgtaataaaattgatagtagttatttttttttcgatttggttttttttagtgttaagtaggatttgtaaattttgttgtattgttatgtttttgttgtttttgtttagagattgtttgtagaatatattaaatgataattagaagaagtaaaatttattttatttaaattttataaggatttgttgtgaggtggcgttaatgatttaaatattttaataatgtttttggtttaaagaatttggataggggtttgtatttgttatatgtttggtttttatttatttaaagtcgtttgttgtttttttttatttgtttttttgtgttttgatttttttattgtaaataatataggtttagagtttttttatttttttttagggtttgtggtttgttgggtaataaatgtttattttttaattttatgttgtttttttttgtttatattttattgaaatttgttttaagtttttgggtttaaggtatttttttattttagttttttaaggtattggggattatagatatgaattattttatttggtagagtgatttttaaattttatttttttttatgttattggaatttttggagttaatttttggttcgaagattaagttttattattttgagtttgtagtaaataaggttttagaaggttttaattttgtagtgttttttaggaggtagagatggggtggtggatgagaaaggagaaaagagataagttttttatagttttataatttgtatttagaaagaaatttggttgattcgtttgtttgaaggcgtaggttttggtaggtagagtagataattggggtagttataattgtttaagggattgtaaggaaaagtaaaatcgatttttgttttttggttgggaggggcgtataaattatcgagttaatagtattatagggtataagaatatggtttcggataatttaaatgtggttttaaatgtggtttattttgttagatgttttttggaaagtttagggagtatgggtttaaagtgagatttttatattgattattatttttgattaaaaaaaatatatatagtttttatattttttaaaggttttaagggtaaggagaaggttttattatgtgttaaatttttgttatgtgttagttggttttgtgttttgtgttgtgtatggtgggttttattttaatttttttgttgataatataagggagttttattttttttgatttatttttgatttgatttatttttgaggagttgaggtttagagattaagagatcggtttaaagttttataggttttgtgttgtatagttgggatttaaattaagatttgtttggttttaaaaatgattaattttagcgtttttatgaatatttatttgataaggaagttttaatggttttagtaaaaaaatgaatataaaataatttaataattttaaatttttgtatttgattaaattaggatggttttaaatttttttgttttttaaattttatttagagaaaaatttttttgaaatttagagaatagtaagatttgtagatattatttgtggtttaggaagggagttaatgttatagaaagtttttgagtagtagggttgtaggcgttttggggtttatgggttgtgtttttggggtttcgtggattttgttgaagataagttagtaatattgtgtcgtttttttttgcgttgttgggtgttttttcggattgtttttttggagaagagttggggaaggaggattgagtggttgagtattgtttattaggggtttttaggtttttttagagggtagttttgtaatttaggttttagagagagttagtgtaggattgtgtttttgagttttgggttttggtggtgggagttgtt

SEQ ID NO: 31 - DNA, 5659 bp, Artificial Sequence
  chemically treated genomic DNA (Homo sapiens)
taatgattatttttagtgtttagttttttttttaagtaaaatatataattaatgttaggtaagttttttttaatggttttttagagagttaaacgtttttatgttgagttggaaatattgatgtttttttttttttgagatagagttttattttgttgtttaggttggagtatagtagtacgatttcggtttattataatttttgtttttcgggtttaagtgatttttttattttagttttttaagtagttgggattataggtatgtattattatgtttagttaatttttgtagttttagtagagatagggttttattatgttggttgggttggttttaatttttgattttaggtgatttgtttattttagttttttaaagtgttgggattataggtacggtggtgttcgattgatttttttttttttttttttttttttttttttttgagacggagtttcgttttgtcgtttaggttggagtgtagtggtgtaattttagtttattgtaagtttttttttttaggtttatgttatttttttgttttagttttttgagtagttgagattataggtattcgttattatatttagttaatttttttgtatttttagtagagacggggttttatcgtgttagttaggatggttttaattttttgatttcgtgattcgtatattttcgttttttaaagtgttgggattataggcgtgagttattacgtttggttcgattttttttttaaatgttggtttttttggttttaatattttgttattattttgataattaagaaatatgtttttgttttaaataataaagattaagagattatttgttttaggtaaatagaaaaatttttattattttttttaatgtgtttagtaaaattataaaggtaattatgttttggggaattaattattttatatagtatgaagtaaataaagttattttgtttaataaattaaataatattagttagttgaggggtataaagaatgaattaattttttttttttgttttattaattttttaagttttatttttaagtatttttgatttaaagataagattgtttttttttgattatttaatttttattatgtttattattaaagttaaagtagatgtaataagttttaatattattgaatttaatattttaattaatagaaatatagattatatttaggttgggtgtagtggtttacgtttgtaattttagtattttgggaggtagaagtgggtggattttttaggtttaggagtttgagattagtttgggtaatatagtaaaatttcgtttttattaaaaattgaaaaaaattagttgggtatggtggtacgtgtttgtagttttagttacgagaaaggttgaggtgggaggattatttgagtttagggaggttaagtttgtagtgagtcgtgatcgtattattgtattttagtttgggtaatagaatgattttgttttaaaggaaaaaaaagaaagaaagaaaagaaatgtagattacgttttagtagtttgggtgaaagttatgaaaataatttacgggaaaaaataattagtttgtgaaataatttttgtaatataattaagagttagtgagaggaggtgatagttaattaagtatgtgaaatgaaatgttttgtagttagttatatttttaggagggttatttttagtttatgtagtttttataagttgttttaatgttataaaaatattatttttatcgagtttatattatttttttggagattgaagagatatttaaattaaatttttgagtttttttttttagtttatttaagttaatttataaaaatataggggaaagaatatagttttaaaaaattaaaacggaaaataaaaaatgtagaaattatagtatgaagttaagagtttaaataagtttataatattaaagatattttatgagtaaaataagaaaattaagtagtaattatttagtttattgattatggttttttttggaatgtagtgaaagatttagttttgttttttgtatttattataggtgttaagagtttaaggagggtttaagattaagggaagttaaatattgttagggaaagtaaatatatgtttaaattattatttttaaataagtttattatttataatttaaaattattaatttttatgtggtttttgtaagtattttttaattttatttttaaataaagagaaattattacggaagtattttttttagaagataatttataattattatttaattcgatttttttttttttttttttttggaaattttggtatatggatttgttattattgttaagaattatttagggttaggcgcggtggtttacgtttgtaattttagaagtttgggaggtcgaggtaggtggattatttgaggttaggagtttaagattagtttggttaatatggtgaaatttcgtttttattaaaaatataaaaattagtcgggtatggtggcgggtatttgtaattttagttatttgggaggttgaggtaggagaattatttgaatacgggaggcggaggttgtagtgagttaagatggtattattgtattttattcgtggtgatagagcgagatttcgttttaaaaaaaaaaaaaaaaaaaagagagacggagttttagttttgttgtttaggatggtatgtagtaatacgatttttgtttacggtaatttttgttttttgggtttaagtgatttttttgttttagttttttgagtagttgggattataggtatatattattgtgtttagttattttttgtatttttagtagagacggggttttatcgtgttggttaggttggtttcgaatttttgattttaggtgatttatttgtttaggttttttaaaatgttgggattataggtgtggtgagttattgcgtttagtttttttttttattttggggaatattttattttgtttatggagtagttgttgttttattattttatttttttaataaatttgtttatattttgtattgcgattcgttttgaattttttttgtatgagatttaagaatttttttttgtggtttggattgggattttttttttgtaataaatgtattggttgataggagaataaagaaaaaaaaagaggaaaaattagagtaatttttttatataattatattatatgatcgttttgttaattatgataatagttaataaaataatttttttatgtttaatttttagtttatgtttgtatgttttaaaatgttttttatagttggtttgtttaattatttaatgaaggattaaatattgtagttggttgttatgtatttagttttttaattttgatttttagattatttttagtttattttattatattcgttttaagttttttgagttagttaattttaatttgttatgtattttataaaatgttttttttttttttatagtcgattgtttttttgtttttggagtttttttttttattttttaaggttattttgagtatatttttttgtttcgtgaaatttatttttttttttttttttttttttttgagtttaattagttgttatcgtaggtttttgtttttttttatagtgtggttagaattcggttttgtttgttagtagagggtagggtcgttgtttttttttttttgtagtttttaagtttagtatatgtttggtatttagtggtagtataataaggaatttgatgaatattttttttttttgtttttcgttttttttttatagtttgttagttatggttaggaagagtaagattcggaatgggtttggtgtgtttcgcgggaaggtcgtgattttggaagatgttttttagtttagttcggattttttttttttagttttagagattttttttattttttgtgtatatatatatattaagatttaggaagtggtttttgaggtaggattttaagagtttaaggagtggggtcgaggttggaggtgtgggggtgtgacggtcggttttatttttcggtttgtttagattagttttttttggggattatttttggtatataagggagggaggtagtttgatttttttagttcgtttttagtttttatttggttttgttttttgggataagacggggaaatttagaggatgtaagttttttttgttttcgtgtttttttttaagttttcgttattatagacggatgtaggagttgtttgggaggttggaagtatagattttgttaatttttttttagagggcgggattcgacgcggacgtgttttgattgattgggtagcgtggtttcggggaagggtttttttttttttttttagattaggatttttggaaaatggagaagttgtgttaatagaggggggttagaaatttttattttagaatgttgtagaatgttgggagatatttaggatgtgagttagggattttttggaagtgtttgttttggttttattcgattttaggtagtttttagttgtttgtatagtcggatggggagggggtttgtatagagttggagttagaggagagagttggtttattttttacggtaggatggggaaattttatagattatattgttattcggttttagtttttcgtttcggcgtttagagggtaatttttatttatttcgttcgtttttttgaattagagtgatttaggttgcgtttcgtttcgtttttttatttcgagttggtacggaggtatagcgttagaggggggttttaggcgtttcgaggttttgtttttgcggttttttttttgcgggggtgggcgttttttttcgggtaggggttacgtggttttggtcgggcggggggttcggtttatttcgcgtcgggtttagtgatttaggtcgtagttgttatcgcgttatatgagggaggtcggcggttattcggcgggggaggggatcgtggttggagttcggggcggggtcgcgcggtaggcggggcgggagtcggggggcgtagttagagagtttcggagtcgcggcgggagaggaacgcgtagttagttttgggaagtttaggtgaggtcgcggggattcggcggatttcggcgcgggttgggagagattattcgtagtttttttttttagggttcgttttaggttcgcggagattcgttcggcgttttttagtcgttttggagtaattttgtttcgaagttttttgggttcgggtagggtgtggcgggggtgttggttgtattttttttttttttggtgggcggggaggttagagtttaggggaaaggggttggggcgggggtcggggttgggttgaagatcgtttttttaggttgggtgttgggtggggaaagggtgtttgacgttcggagattggcgggtcgagggtcggcgttaggtttaagtttttgtcggcgtttttggatttgttttgggttttagaggcggcggggcggggttcgggtttcgcggtcgtcgtttttattttttttttgcgggtaaagagggggttgggagacgtggattcgatcgcgggttttcgggtgggaggggtcgggaatcggggtcgtgaagggaagttttcgagggtcggtcgggagttcggaaatcgaggttttttttcggttagttttaattttttcgtttttttttttgttttagg

SEQ ID NO: 32 - DNA, 5659 bp, Artificial Sequence
  chemically treated genomic DNA (Homo sapiens)
tttggggtagaggggagggcggggggattaaaattggtcgaagggggatttcggttttcgggttttcggtcggttttcgagggtttttttttacggtttcgattttcggttttttttattcggaaattcgcggtcggatttacgttttttagttttttttttattcgtaggagaggggtgggggcgacggtcgcgaagttcggatttcgtttcgtcgtttttggggtttaggatagatttaagggcgtcggtaggggtttgagtttgacgtcgattttcggttcgttagttttcgggcgttaaatattttttttttatttaatatttagtttggagaaacggtttttagtttaatttcgattttcgttttagttttttttttttgggttttgattttttcgtttattaaaaaaaaaaaaagtgtagttagtattttcgttatattttgttcgggtttagggaatttcgaagtaaagttgttttagggcggttggagagcgtcggacgagttttcgcgggtttggggcgagttttggaggaagggattgcgggtggttttttttagttcgcgtcgaagttcgtcgggttttcgcggttttatttgggttttttaaggttggttgcgcgtttttttttcgtcgcggtttcggggttttttagttgcgtttttcggttttcgtttcgtttgtcgcgcggtttcgtttcgggttttagttacggttttttttttcgtcgagtggtcgtcggttttttttatgtgacgcggtaatagttgcggtttgagttattgggttcggcgcggggtgggtcgagtttttcgttcggttagggttacgtggtttttattcggaagaaggcgtttattttcgtaaagggaaagtcgtaagggtaagatttcggggcgtttggggtttttttttggcgttatattttcgtgttaattcggggtaggagagcggggcggagcgtagtttgggttattttggtttagagaagcggacgaggtgggtgagagttattttttgagcgtcggggcggagagttgaggtcgggtgataatgtggtttgtgaggtttttttattttatcgtaggggatgagttagtttttttttttggttttaattttgtgtaagttttttttttattcgattgtgtagatagttggggattgtttggggtcgggtggggttagaataaatatttttagaaagtttttggtttatattttgggtgttttttaatattttatagtattttagagtggggatttttggtttttttttattagtatagtttttttattttttagggattttagtttgagaaaaggggaggaagttttttttcgaagttacgttatttagttaattaagatacgttcgcgtcgggtttcgttttttgggggaggattgataaggtttgtgtttttagttttttagatagtttttgtattcgtttgtgatagcgagggtttgggggaagatacgaaggtaggagaggtttatattttttggattttttcgttttattttagaagataaagttaggtgagggttggaagcgggttagggggattaagttgttttttttttttgtgtgttaggggtggtttttagaaggagttgatttgaataggtcggagagtaggatcggtcgttatatttttatatttttagtttcggttttattttttgggtttttaaggttttgttttaagaattattttttgagttttagtgtatgtgtgtatataaagaatgaaagaagtttttagagttaaaggaaggagattcgggttgggttgagaagtattttttaggattacggttttttcgcgggatatattaagtttatttcggattttgttttttttgattatggttggtaggttgtggaggaggagcggagagtagaagaaaggagtatttattaggttttttattgtgttgttattagatgttaggtatgtgttaggtttgggggttgtaaggagaggaagatagcggttttgttttttgttagtaggtagaatcgagttttggttatattgtgaagaaaggtagaagtttgcggtggtagttggttaagtttagagggagggaaagggagaggagaatggattttacggagtagaaggatgtgtttaaggtgattttggagaataaaggggagagttttagggatagagaagtagtcgattgtggaaaaaaaaggagtattttgtaaagtatatggtaggttggggttggttggtttaaagggtttgggacggatgtggtgagatgggttgaaggtggtttgaagattaagattgagagattagatatataataattaattgtaatgtttggttttttattgaatggttgaataaattagttgtgaaagatattttgggatatatagatatggattgagaattagatataagaaaattattttgttaattgttattatggttaataaaacggttatataatatgattatgtagagaagttattttagttttttttttttttttttttttatttttttattagttaatgtatttgttataggaaaggggttttaatttagattataagagagggtttttggattttatgtaagaaagatttagggcgagtcgtagtgtaaagtataagtaagtttattaagaaagtaaagtggtgaaataatagttgttttatagatagagtaggatgttttttaaagtaagaggaggggttaggcgtagtggtttattatatttgtaattttagtattttgggaggtttaggtaggtggattatttgaggttaggagttcgagattagtttggttaatacggtgaaatttcgtttttattaaaaatataaaaagtagttgggtataatgatgtgtgtttgtagttttagttatttaggaggttgaggtaggagaattatttgaatttaggaggtagaggttgtcgtgagtagaaatcgtgttgttgtatgttattttgggtaataagattgaaatttcgttttttttttttttttttttttttttgagacggagtttcgttttgttattacgggtggagtgtagtggtgttattttggtttattgtaattttcgtttttcgtgtttaagtgatttttttgttttagttttttaagtagttgggattataggtgttcgttattatgttcggttaatttttgtatttttagtagagacggggttttattatgttggttaggttggttttgaatttttgattttaggtgatttatttgtttcggttttttaaatttttaggattataggcgtgagttatcgcgtttggttttaaataatttttaataatagtagtaagtttatgtattaaggtttttaagaaagaggagggaagagaatcgagttgggtagtagttataggttgttttttgaaaaaggtgttttcgtgatagtttttttttgtttggagatagagttaagaaatatttgtagagattatatgagaattaatgattttggattgtgaatggtagatttgtttggaggtgatgatttagatatgtgtttgttttttttggtagtgtttggttttttttgattttaagttttttttaggtttttgatatttgtgataaatgtaggaggtagggttgaattttttattgtattttagaggaggttataattagtggattggatggttgttgtttagtttttttattttgtttatagggtgtttttgatgttataggtttatttgaatttttagttttatattatagtttttgtattttttgtttttcgttttgattttttaaaattatgtttttttttttatgtttttataggttaatttggataagttgaaggaaagagtttaaagatttggtttgaatgtttttttaatttttagaaaggtaatgtaggttcgatggaagtaatgtttttgtgatattagagtagtttatgggaattatataggttggaaatgatttttttgagaatgtagttggttataaagtattttattttatatatttgattgattgttatttttttttattgatttttgattatgttataggaattattttataagttgattgttttttttcgtggattgtttttatagtttttatttaggttgttagagcgtggtttatattttttttttttttttttttttttttttttgagataaggttattttgttgtttaggttggagtgtagtggtgcgattacggtttattgtaggtttgatttttttgggtttaggtgatttttttattttagtttttttcgtagttaaaattataggtacgtgttattatgtttagttaattttttttaatttttggtagagacgggattttgttatgttatttaagttggttttaaatttttgggtttaagggatttatttatttttgttttttagagtgttgggattataggcgtgagttattgtatttagtttgagtatggtttatatttttgttggttaagatgttaaatttagtgatgttaaaatttattatatttattttaattttgataataggtataatgggaattaaataattaggagaagatagttttgtttttaggttagaagtatttagaaataaaatttggaggattggtggaataaaaaaaaaaagttaatttattttttatgttttttagttaattgatattatttagtttattaagtaagatgattttgtttattttatgttatgtggggtgattggttttttagggtatagttgtttttgtagttttgttaggtatattggagaaaatgataaggatttttttatttgtttagagtaggtggttttttaatttttgttgtttagaataagaatatgttttttggttgttaaagtggtggtagggtattaaaattagaaaaattagtatttaagaaaaaaatcgggttaggcgtggtggtttacgtttgtaattttagtattttgggaggcggagatgtgcggattacgaggttaggagattgagattattttggttaatacggtgaaatttcgtttttattaaaaatataaaaaaattagttgggtgtggtggcgggtgtttgtagttttagttatttaggaggttgaggtaggagaatggtatgaatttgggagggggagtttgtagtgagttgagattgtattattgtattttagtttgggcgatagagcgagatttcgttttaagaaaaaaaaaaaaaagaaagaaagaaaaaaattagtcgagtattatcgtgtttgtaattttagtattttgggaggttgaggtgggtagattatttgaggttaggagttgagattagtttagttaatatggtgaaattttgtttttattaaaattataaaaattagttgggtatggtggtatatgtttgtaattttagttatttggggggttgaggtgggagaattatttgaattcggaaggtagaggttgtagtgagtcgagatcgtgttattatattttagtttgggtaatagagtgagattttgttttaaaaaaagaaaaatattagtatttttaatttagtatgaaagcgtttagttttttagaaagttattggaagaaatttatttgatattggttatatattttgtttgggaaaaaaattaaatattaaaagtaattatta

SEQ ID NO: 33 - DNA, 6112 bp, Artificial Sequence
  chemically treated genomic DNA (Homo sapiens)
atttataggggtagggttgtagggtatttgtaggagttgggagtttgggggatttggtggagttgggagtaattgttgttaattttttttaagagtttgtttttgaaaaaggtaatggaagggaaggaggtattgaaatggtaggtggtaggttaggcgtggtggtttacgtttgtaattttagtattttgggaggttgaggtaggcgaattaggagattaggagatggagattattttggttaatatagtgaaattttgtttttattaaaaatataaaaaattagttaggcgtggtggtgggtgtttggagttttagttattcgggagggaggttgaggtaggggaatcgtttgaatataggaggcggagtttgtagtgagtcgagattacgttattgtattttagtttgggtaatagagtaagattttgttttaaaaataaataaataaaaaatataaaaagtagttgggcgtggtagtaaacgtttgtagttttagttatttaagggattgaggtgggaggattatttgagtttgggatgtcgaggttgtagtgagttgtgttaatattattggattttagtttggttaatagagtgagtttaaaaatatatatttatatttttatatatttatatattaaaaaatataaaaaagtggcgagtgatagttgaggagattattgtagtgggaattttaggagggggtgaggaggggttcgttggtataggggaaggggtgttatagagaaagattttggtttttttggggttttggagtggtagagagagtttaggatgtttgtaaatgtatagaaattagagggtgggaatttttttgggaggtttgtttttttttatgaaggagaagatagagtaattttgttgatagggagggtagagaaggagaggtgaggggtttgagggaagaggtttggtatagaggttggggagagggaaatgagagcgtttaggagtttttggaagatgatttgggttagtagttggggttgttattagggtagttgttgggagggtagggtatttggaggttttaaatttgtattattatagatttttttttagtagggtttaattttttggatggagaggtttgggaggtgtagtagggaagttggggatgacgttgatttggggtttataatatttttttttagtaggtttaggggtttgtagttgttggtaacgggttgattttatttttgggtgaataggtgaagtttttcgggttgtttcgggaagataaaggttgggttttttggtttcggtttttgggattttgagatatagatgttttttttgggaaaggttcgttaatatattaagtaaggtttggtaagggaggaagagtttagggtttttttttgatatttgggggaaagtgttggggaagatttgggtagtatttaaaggttttagtgaatttaaagatagaaggaagatagaaggaggttggattggtaaagggaattttatagtagatattttaggtttttatatttagtagatttggagttttggaagttgaggttgtgaattttttttcggttagttggggtgtttagttttgttttgttcggtttatatggtagggatttattttgtaggttttgtgggttgggtgttggttgggtttggttagttttatttgtaatttagggggaggagtaggggagatataggatgtttttaattttttgattttttgaagtttttttggtattagttcgggtttttattatagtttttagtggaagagtttggaaggggggtagttgttttttgtttagttttttcggttttttagtaattttattttttatgttattacgtttttgcgttaagtttttttttttttaaatatttaatgtgattttttttggttagttggagtttaattgagatatttattttttagaagtttagttttgggaagtggagttaatttttggaagtttgtagattttttttagtgggttgttagattttagtatgagtatgaggtttattatggtttattgggttttaggggttagaagtgtttatgggtgttttaagtgggtgttttattatataggttttatggggggtagttagattatagtagtagatagagttgggtcgggtttatgtaggtttaaagaagtagttagtggttatttaaggtagtggtatttttgtagttttttggttggtgtttgagattagttatattttttataataattagagttatgtttatattttttattattatttagttttttttttgttaaaacgtggagtattgttttttagttttggagtttaggggtagtagataatttgagttagttggagtaggtggggtcgtttttggttggaacggttatggaaaattttaattaaagatagtatttgggagaatatttatgaaaatgtgaaagtttatatttttgatttagttgttttatagatatgatttgtgtaaaataacgtaagtgagaatatttgttatagtagtttgtaatggttaaatatagtaaaaaattttaattatttagtaatggtgattagataaattgtgatttttttatataaggaatgttatgtagttattaaaaagaatgaggtagttttatatgtgttgatgtaggatgagttataagatatatatagttaatataaaagaagagtttagaatagtgtatatgatagcgtttgtattaaatataataaatatatttgtttatttgtacgtacggttgaatttggaaggatatataagagattgttattgttttgagattgggaggtttaggggataggaacgggagggagattttttattgtgtatttgtttgaattttttgaattttgtattatgtgtatattttataatttaataaatatttatgtttttaaaagaaaataaaaaagtatttagaaataaataggttagacgtggtggtttatttttgggaggttgaggagggaggattgatatagttggggatgttaaggttgtagtgagttatgattttgttattgtattttagtttgggtgatagagtgagattttgttttaaaaaaaagaaattgggatgatatagtagtgtttttatttatattttacgtttttattgttagttatgcgatttttggataagttaatttatttttatgttttagtttttgtaaaatagtggtaattttttggaaaggttattttgaagagtaagttaattaatatgtaaagagttggaagagcgtttggtattgaattagtattatgaagtgttagatattgttattttgttgttttagattaattttaaagtaacgttatttgagttatgtcggttttttttgttgttgtttttatttaaatattttatttatttaataaataattttatttttttttttttttttttttttgagatggggtttcgtttttgttttttaggttggagtttaatgacgcgatttcggtttattgtaattttcgttttttgggtttaagcgatttttttattttagtttttcgagtagttgggattttaggcgagcgttattatgttcgttaattattttttgtgtggagatagggtcgtattatattatttaggtcggttttaagtttttggatttaagcgatttttttgtattagttttttaaagtattgggattataggtatgagttatcgtattcggttttaataaatgtttttttttttgagacggagtttcgttttgtcgtttaggttggagtgtagtgggcgatttcggtttattgtaattttcgttttttcggtttatgcgtttcggttttttaaaatgttgggattgcggatttgagttatcgcgttcggtttgaggtgatttttaataagtatagtcgtagttgtagatattttggttttgtaggaataatgaggtatggatggatttatagttggatttatggatgggatggattttcggtaggttttggacggagggaaatgttttggtttgttaagttcggtatcgagtgagatttatttataaagttaatcgtggaagttattggcggtttttttcgttttgtcgtcggggaattttgtcggtggttttcgatttgttttcgggttatttggtgatattgatttcgtagttattattttaattggcgtattcgatttaaataataattagggaatttgtgggcggttaaaggttcggttttgcggtcggtttttttaggtttttttttttgttttgtgaggttagaaagttattttttcgaggtcgttttttatgtcgagaaatatttttcgtttgaggttttgtggggtaggggaggttcgtgtattttttatagaaaatttcgtatagattcgcgattgtttttattaatagtttttaggagattgtttgtagtcggggggttgtcggttttatgttcgcgggtaagtagggataagttgtgtttttaaaagggttaacgggaatttcgcggtttttgaattttcggtgttggcggatttttcgttttagggttattaggagtcgcggcgtgagtgcgtgtcgggatcgagcgcggggtttttgaggaattttaaggttgtttaagtttacggatttagttatattggcgaatcggagatcgttcgattttattattttcgcgttttttttatagtcggcgttaaaaacgttagttttacgacgtaggtcgggattcgcgcgtttacggtttaattagcgcggattttgtataaagcgagtttcgtttttacggcgtcgttgttagtttttttttttttcgtggtcgtttcggttcgtttatttttcgtttcgcgtcgtttacggttagaggttcgcgattggtttatggggacggtcgcgagttttggttggtcggcgcggagttacgagggcgtcgtcgtcgtttttttataggcgattattgggtaggtttagtttttcgttttagtttcgagttttcgttggttttcgggtgtacgtgtttcgggatttttagtattcgcggtcgttatcgtcgtcgtttggttttttttggatttatttgcgttatttgttcgttttatatttcgtcgttattatggtgaagttcgcgaaggtaaacggttttgagcgcgagcgtagacgtgtaggtttgtttttcgaggggcgagcgcggcgtcgcggggaggagggtttgcgcgtagtttcgggcgcgttttagggcgttatgttgcgggaagtttcgcgcgattagtggggaggtttcgcggtttttggttatttggtggcgaggtgaagagtttttgtaggtgttgggggcggcgaacgcggcgggaaagatagagttattgagcgcggggagggggcgttgggtttcggggtggagagatgagattaaatttttgcgacgcgtacgagttgggattcgatttttgacgtacgtgttcgggagcgcggtttgttacgtgggtcgcgtcgcgtgggttttggaatttttagagggatcgggtgttttgggtcgggaaatggcggtatcggttttagtcggagtttcggttgcgttcggatgttttcgtttcggtttggtaagtcgatacgtggtgggtttcggaaggtggttttgtcgcgtgttttttgcgttgtgtttcgggtacgtggtggtttattaggtatttttacgtggtcgcgtcgtttttttaaggggcggggttgtttcgttgggaaaggtataagttttatgagaaaattaaggtagttatttttttaagtgttttaatgatttttatcgttaatttggatttagatgagggtggtagaataaagtatcgggatttgtagtattaaaatacggttgtgtttaattaaggtaacgggaggagaaattatttttttaggttgattttttattttagggtaggttttttgttggtaaagtttgggaggaaaaatgtgggcggttgagagtagttttttttgtattgttattaggagtagtttttatgttagttgtggtgtttggtattatgagaaatggatttgaggacggagatgatggcgtatgaatattaatggtaaaatatggggattttttagtagatt

SEQ ID NO: 34 - DNA, 6112 bp, Artificial Sequence
  chemically treated genomic DNA (Homo sapiens)
ggtttattagaggatttttatattttgttattagtgtttatacgttattattttcgtttttagatttattttttatagtgttaaatattataattaatatagaaattatttttgatggtaatgtaagagggattatttttaatcgtttatatttttttttttaggttttattaatagaaaatttgttttaaggtaaaaagttaatttgaggaaatgattttttttttcgttattttagttaagtataatcgtgttttaatattataaatttcggtattttattttattatttttatttgaatttaaattaacggtgaagattattaaggtatttaaaaaaatgattattttgatttttttatgaagtttatgttttttttagcgagataatttcgttttttaaagaggcggcgcggttacgtgggggtatttggtaggttattacgtgttcgaaatatagcgtaaaaggtacgcggtagagttatttttcggggtttattacgtgtcggtttgttaggtcggggcggagatattcgagcgtagtcgggatttcgattagggtcgatatcgttatttttcggtttaaggtattcggtttttttggagattttaggatttacgcggcgcggtttacgtggtaggtcgcgttttcgggtacgtgcgttaggagtcgagttttagttcgtacgcgtcgtaaaagtttggttttatttttttatttcgaggtttagcgtttttttttcgcgtttagtgattttgtttttttcgtcgcgttcgtcgtttttagtatttgtagaagttttttatttcgttattaagtagttagaagtcgcgagatttttttattaatcgcgcgagatttttcgtagtatggcgttttagaacgcgttcgggattgcgcgtaggttttttttttcgcggcgtcgcgttcgtttttcggaaagtaggtttatacgtttgcgttcgcgtttaaggtcgtttattttcgcgagttttattatgatggcggcggagtgtgaagcggataagtggcgtagatgagtttagaagaagttaagcgacggcgatggcggtcgcgggtgttgaagatttcggagtacgtatattcgaaggttagcgagagttcgagattgaggcgaaagattgagtttgtttagtaatcgtttgtggaaaggcgacgacggcgttttcgtgatttcgcgtcgattaattaaagttcgcggtcgtttttatgagttaatcgcgagtttttaatcgtgaacggcgcggggcggggagtaggcgggtcgaggcggttacgggagggggaggggttggtaacggcgtcgtgggggcggggttcgttttgtgtaaggttcgcgttgattgggtcgtgggcgcgcgggtttcggtttgcgtcgtgggattggcgtttttggcgtcggttgtgaggggagcgcgggggtggtggaatcgggcggttttcggttcgttaatgtggttgggttcgtaggtttgggtagttttggagttttttagagatttcgcgttcggtttcggtacgtatttacgtcgcggtttttggtggttttggagcgaggagttcgttagtatcggaagtttagggatcgcggagttttcgttggtttttttggaggtatagtttatttttgtttgttcgcgagtatggggtcggtagtttttcggttgtaggtagttttttgagagttgttaataaaggtagtcgcgggtttgtgcgaggttttttgtgagaaatgtacgaattttttttattttatagaattttaagcgggagatatttttcgatatggggaacggtttcggagaagtaattttttggttttatagggtagggagaggggtttgggagggtcgatcgtagagtcgggtttttgatcgtttataggttttttggttattatttgggtcgaatgcgttaattaaggtggtggttgcgaagttagtgttattagatggttcgggagtaggtcgagagttatcggtagggtttttcggcggtagggcgaaggaggtcgttagtgatttttacggttagttttgtgggtgggttttattcgatgtcgggtttagtaaattagagtattttttttcgtttagggtttgtcggggatttattttatttataggtttagttatggatttatttatattttattgtttttatagaattaggatatttgtagttacggttgtatttgttaaaaattattttaggtcgggcgcggtggtttagattcgtaattttagtattttgggaggtcgaggcgtatgaatcggggaggcggaggttgtagtgagtcgagatcgtttattgtattttagtttgggcgatagagcgagatttcgttttagaaagaaaagtatttgttaaggtcgggtgcgatggtttatgtttgtaattttagtattttgggaggttgatgtaggaggatcgtttgagtttaggaatttgagatcggtttgggtaatataatgcgattttgtttttatataaaaaataattagcgggtatggtggcgttcgtttggagttttagttattcgggaggttgaggtgagaggatcgtttgagtttaggaggcggaggttgtagtgagtcgagatcgcgttattgaattttagtttgaggaataagagcgaaattttattttaaaaaaaaaaaaaagaaagaaaataaaattatttgttaaatgaatgaagtatttaggtagaagtagtagtagggagagtcggtatggtttaagtggcgttgttttggagttggtttggggtagtaaaatagtaatatttaatattttataatgttgatttagtgttaggcgtttttttagttttttatatattaattaatttattttttaaaataatttttttaaaaagttattattgttttatagaaattgggatatagaggtaaattaatttgtttaggggtcgtatagttagtagtggaggcgtaggatataagtgaagatattgttgtgttattttagttttttttttttgagatagaattttattttgttatttaggttggagtgtagtggtaggattatggtttattgtagttttgatatttttagttatattaattttttttttttagttttttaaaggtgagttattacgtttggtttgtttgtttttaaatgtttttttgtttttttttgaaaatatgagtatttattgaattgtaaagtatatatatagtgtaaaatttaaaagatttaaatagatgtataataaaaggtttttttttcgtttttgttttttaggttttttagttttaaggtagtggtagttttttgtatatttttttagatttagtcgtacgtgtaaatagataagtatatttgttatatttaatataaacgttattatatatattgttttgagttttttttttgtgttaattatatgtattttgtaatttattttatattagtatatgtagagttgttttattttttttaatagttatatggtattttttgtgtggaaggattataatttatttagttattattgttggatagttagggttttttgttatgtttggttattataaattgttatagtaaatatttttatttacgttattttatataaattatatttgtagaatagttgggttaagggtatggatttttatatttttatagatgtttttttaagtgttgtttttggttggggttttttatggtcgttttagttaagagcgattttatttgttttagttggtttagattatttgttgtttttgagttttaaggttgggagatagtgttttacgttttagtagaggaagaattagatggtggtgagaggtgtgagtatggttttaattattgtggggagtgtgattagttttagatattagttaagaagttgtagggatattattgttttgagtggttattggttgtttttttgggtttgtatggattcggtttaattttgtttgttgttgtggtttggttgttttttatgaaatttgtgtagtgaggtatttatttgggatatttatgggtatttttgatttttgagatttagtaggttatagtgggttttatatttatgttaggatttgatagtttattggagggggtttgtaggtttttaaggattaattttattttttaggattgggtttttaggaaataagtgttttagttaggttttaattagttaagaaaaattatattgagtatttaaaaaagagggagtttagcgtagggacgtggtgatatgagggatagaattgttgagaagtcgaggggattgagtaggaagtagttgttttttttttaggtttttttattgaaggttatgatgagggttcgggttgatgttagggaagttttagaaggttaggaggttggggatattttgtgttttttttgtttttttttttgagttgtaggtagggttggttagatttagttagtatttagtttataaagtttgtagggtgagtttttgttatgtaggtcgagtagggtagggttgggtattttagttggtcgggagggagtttatagttttagtttttagagttttaggtttgttgagtgtgaaggtttggggtgtttgttatgaagttttttttattagtttagtttttttttgttttttttttgtttttgggtttattgaggtttttggatattgtttagattttttttaatatttttttttagatgttaaagggggattttaagtttttttttttttgttaggttttgtttagtgtgttagcgagttttttttagaggaggtatttgtgttttagggttttaggagtcggagttagagaatttagtttttgttttttcgaggtagttcgagaagttttatttgtttatttagaggtagagttagttcgttgttaataattgtaggtttttgagtttgttggaggagggtgttgtgggttttagattaacgttatttttaatttttttgttgtattttttaggtttttttatttaggaggttgggttttgttggagagaaatttgtgatgatgtagatttggggtttttaaatgttttgtttttttagtagttgttttggtagtagttttagttgttagtttagattattttttaggagtttttgaacgtttttatttttttttttttagtttttatgttaagtttttttttttaggttttttatttttttttttttgttttttttgttaatagagttattttatttttttttttatagggaaggataaattttttagagggatttttattttttgatttttatatatttgtagatattttgagttttttttgttattttaaagttttaaggaaattagagtttttttttatagtatttttttttttgtgttagcgagtttttttttatttttttttggggtttttattatagtgatttttttagttgttattcgttatttttttgtgttttttggtgtgtgggtgtgtgggggtgtgggtgtgtgtttttggatttattttgttggttaggttggagtttagtggtgttaatatagtttattgtagtttcgatattttaggtttaggtgatttttttattttagttttttaagtagttaagattataggcgtttgttattacgtttagttattttttgtattttttatttgtttgtttttgagatagagttttgttttgttgtttaggttggagtgtagtggcgtaatttcggtttattgtaagtttcgttttttgtgtttaagcgatttttttgttttagtttttttttcgagtagttgggattttaggtatttattattacgtttggttaattttttgtatttttagtagagatagggttttattgtgttagttaggatggtttttattttttgattttttgattcgtttgttttagttttttaaagtgttgggattataggcgtgagttattacgtttggtttgttatttgttattttaatattttttttttttttattgttttttttaggaataagtttttgggaagagttgataatagttgtttttagttttattaggttttttaggtttttagtttttgtaggtgttttataattttgtttttgtaggt

SEQ ID NO: 35 - DNA, 6271 bp, Artificial Sequence
  chemically treated genomic DNA (Homo sapiens)
  unsure (4779)
agtggtataaatatggtttattgtagtttttattttttgggattaagtaattttttagttttagttttttgagtagttgagatgatagttgtttatcgttatgtttagtaaatttttttattttttgtaaagatacgattttattatgttggttaggttggttttgaatttttgggtttacgcgatttatttgttttagtttttaaagtgttgggattataggtttgagttatggtgttcggttatatttatggatttaattgtttttggaattaatatcgtgtaggaaaggagtaggattgagtagaaaaagttgaattaaatgtagttatagtaaatgttttagttttcggattttaagggagttttggtgttaggagagttttttagagtagttttattttgagttttgtatttgttagttagtgtagacggatttggtgagaggtagttttttttagttgaaggtaatttttggaaagggatttagttgataggtgttgataagtaatgcgtttagtagttgaggaaatgagtattttagttttgaagagtggtgtgttttttggtatgttgggatggttggttgtgttagtggagatgggggtggtgggtagaatgaagggaatattattgtaaaagttttttattttttatttatatttatttatttatttattttttaagataaggtttaattttgatgttcgggttggagtgttggaatgtaatgatattattatagtttattgtagttttgattttttgggtttaagcgatttttttattttagttttttaagtaattggaattataggtatatgttattatgtttagttaattaaaaaaaaaaattttgtagagatgaggtttcgttatgttgtttagggtggtttggaatttttgggtttaagtgatttatttattttggttttttaaagtgttgggatgataggtatgagttacggtttttagtttggaataaaatttttcgaagaaaaaattggtagagtttgttgtttgattaaaaaatagaggttgaatgagagagatgtatttaaaataatacgaaatattaagggttttttgaatattgttggatagtgtaaaatgggggaagttaggatataaatttaattttgttttattgtaaggtttatgtttttttattagattagtgttggttaaattggtgttttatgggttatatttagatagtagacgtattttgtttggttatatagtatttaaaaaatgtaaattggttgttattatgtaaaaattggaagagtttatatgtaagtttagatttttagttttttttgagtaattagaagatttagtaatattgggttaatatttttgtatggtagtaattggagttgagtgatagatattttttaaatggagagagtattttttatttggataaatggaggtgggtatatgttttttaatttattatagtttttatgtattattttttttggtattttttttttgagatggagttattttgtcgtttaggttggattgtagtagtataatttaggtttattgaaattttagttttttgggtttaagtaatttttttgttttagttattttagtaagtagttgggattatagttatgtgttattatgttcggttttttttttttttttttttttttttagtagagatggagttttattatattggttaggttggttttaaatttttgattttaggtgatttgtttgtttcggttttttaaagtgttgggattataggtatgagttatagcgtttagttttttttggtatttttgtttagtatttttgttatatgtattatgtatggtttaataaagtatataatatataataggtatttgggtatttttatttttatttattttttagagatagggttttgttttgttgtttaggttggagtgtagtggcgagattatagtttattgtagttttgatttttttagtttaagtgatttttttattttagttttttaagttgttgggattatagatgtatattattatgtttaattaatttaaataattttttttggtagaagttgggattttattatgttgtttaggttggtttgaatttttaggtttaagtaatttttttatttcggtttttaaaagtgttggtattataggtgtgagttattacgatcggtttatttggatatttaatattggtttagtagaattgaatgaatttaattggagaggaagttggggtgaagtttaggtttttgattataatgagaggtttggtattgaggggaggtaatagaatagggagtataaattaggatgaattaatgatatgttggtaggagtttgagtaaaggaagaagagtagagggttagggtttgaagtttgggtgttttattatagagttaaagaagagtgggtaatggtagattaaattagagaagaagaggagagaaaggtatagaggaattttagtaacggaatgttagggaaggtaagggagttgagggtttgggtagttgtatttagtgtagggaagaagattagggagatagataggtaaaaagttatggtaataaggaagtagttagggatttttagaggaagtatgagaaaaggagaggaaggttataggtttgaagtttagtagtgtagtagggggtattggaatattattttgggggtatgagtgagtgtttttttaggggttttatttgggagaaatatagatagatatttatttaatatttatttatttttttttagtatagttattattttgatattatttaaaagaaattagtatttgtattgtatttttaaagaagaagggataaaagatatgtttaaattgtttgtttgttttagtggaataaaatattaatttaatatgtattttggataattattaatttagagattggaaattttttttaaggatatatttttttgtatgtgggttattggttttgtggtttttttgtaggaaaattaaaattttagttttgtttttttttattatttagtgtttgtgtggtttaattggttgattagcgcgtgtttggaatgtgtaaatttattttaatattggtttaggggtttgtgtggtagtttatttttgttattttagtattttgggaggttaaggtagggggattatttgaggttaggagttttagattagtttgggtaatatagtaagattgtgtttttattaaaaaaaaaaaaaaaaaaaaaattagttaaagtagggtgatatttatttgtagttttagttatttaggagtttgaggtgggaggattatttcggtttaggagtttgaggttggagtgagttatgattgagttattgtattttattgtatagagttagattttgtttttgaaaaataaaaatatttgtttaggtaaaatgtatcgaggaagataaattttaaaattatttattttaggttaggtgcggtggtttatatttgtaattttagtattttgggaggttgaggtgggcggattatgaggttaggagtttaagattagtttggttaatatggtgaaatatcgtttttattaaaaatataaaaattagtcggttgtggtggcgtatgtttgtagttttagttattcgggaggttgaggtagaagaattattttaatcgggaggcggaggttgtagtgagtcgagatcgcgtttttgtattttagtttgggtgatagggtgagattttgttttaaaaaaaaaaaaaaaaaaattagttattttaaagtttaatgttagatatagattattcgttgttttggatgtaattttttttttggaaaattggtataatttaattatatatgaaatttttttaattttggtattggaggtatagggaaggattttgttttaggagatttatagtttatttttattgttttaggagttaaattacgttggtttatattttgattttgttatttgttaatttagattttgggtaaattaaaggtttgagggaggagtgtaggtttttagcgtttttacgggggtggggacgtgacgtatttattagtttatgaagttaatgatatgtattgaaaaggtttgtttaaggatttaaataagacgatgaatatattgaattaataatgaatgtaaggttttaaaggtgttttgagggtggtgaaatttgaattttttattaattgtgtaatagttatattaatttggatggttatgagttttgtagaggaaagttgggtttaaattttaatgttagatttggtggttagattttgattgttatcgggtttagtattgggatttaagcgatttttaaaaaaaaaaaattacggaatttttttttggttttttttttttgttttttagtagtttattaagttacgaagaatttgaaaatcggaggtcgtgtattttattttttttgagagtttaagttgagagtatagtttttttaggagattagcggtagagattcgcgcgttgggagaaaggttagttttagggcgttttaatttttaatttcgggagtaatttaaattcggaggtcggcgggggaggggatagttgtagggggcggtggggatgggagtggatgttttcgggttagttttggtattcgttagttgagtttagcgttagtttaggtgagttttacggcggtgagggacgttcgttagacggtttagaggagttagatgacgttatttttaggaggattcgtttttttattaatgaaatcggtcggcgcgggcgtatgcgcggnaggtcgttttttttttcgtttttttttttttttttttagtcgcgtttttaatttttagttcgttcgcgtttttttttttcgggtcgtggaaaggattttattttcggtggggtgttatggcggcgtttcggattgtgatggttgtggggagacggcgttagtggggagagcgattaagaggttttttttttttttcgggttttttttttttatttttttttttttagtttttttgttaacgttttttttttttttttttttttcgttcggcgttgattttttatttttattttcgtgggaatattgggagtttgtattttatagattttttttttgtttttttttttattttagttttcgtttttcgtttttttttcggtttagggcgtcggtttattttttttttcgtcgtttttcggtcgcggggaggatatggtcgcgtataggtcggtggaatgggtttaggtcgtggttagtcgtttcgacgagtaggtaatcggttcgtggcgggcgggaggtgggagcggagtgggggtggggatagagtaggtgaggggaggtaggagcggtcgtttttttcgcggttgttttaggttttggaggaaaggaagggaagggaagagaagggaaggggggataagtgggggtggttaaggcgggaggtgaggggtaggaggggatagttgggagtttgggtatttttttttttttaagtcggggggtggggttttgtttttgattagttttcgattttttattttttttattttagttttttcgtttggaaatggggatgagtgatttgggggcgtttttaggggcgcgttatttggatttaataattatttttttatttttgtttttgagtagaggtgggtaacgtttaggggttttttttttttttttttttcgtgatttttttaattggggacgagcgaattttaaggtttgttttatatattttttataggagaacgataatatttcgttttttttttagtttttttagtttttttttttggagggggaagagtagaagaaagtaaggaaggtataggtttttttattttttgttttatcgttttattttgtttcgagagttttaagtgtatatttattgtatatttttgtgatgttttataacgtcgttttttatattttgatgatatagattgttttttttttttattgtcgtttgtagtggaaatcgtggttttgaaatattttttttttttttgataattgtagttttttttttttttttttttttttttgttagcggtttgaggatgtgatgtattttcgagtgagaatgttggggagtaaaggggagaagggtgaaaggaaagtgagaaattgttttagagttatcgataatagagtaaagttagttgggatgtggttttggagcggattattttgttagtgtttgtggttgtttttgatttttttttggttgataagagaatttttattgagaatatttgggatg

SEQ ID NO: 36 - DNA, 6271 bp, Artificial Sequence
  chemically treated genomic DNA (Homo sapiens)
  unsure (1493)
tattttaaatatttttaatgaaagtttttttgttaattaggagagagttaaaaataattataaatattagtagaatgattcgttttaggattatattttagttggttttgttttgttgtcggtggttttgaagtagttttttattttttttttattttttttttttttattttttaatatttttattcgagaatgtattatatttttagatcgttggtaaaaaaaaaaggggggggggaagagattgtaattattaaggaaggggaaggtattttagaattacggtttttattgtaaacggtaataaaaaaaaaaggtagtttgtgttattaggatatgggggacgacgttgtagggtattataaagatgtgtagtgagtgtgtatttgaagttttcggggtaggatgagacgatggagtagaaagtaagaaaatttgtgttttttttgtttttttttgtttttttttttttaggagaggaagttgaagaaattgggggaggggcggaatgttatcgtttttttatagagggtatataagataggttttagggttcgttcgtttttagttaggagggttacggagggaagaggaagagagaatttttaaacgttatttatttttgtttaaaaataaaagtaagggggtaattattaaatttagatggcgcgtttttaaaggcgtttttaggttatttatttttatttttaagcggaagggttgggataaaggggatggagggtcggaggttggttagggataaggttttatttttcgatttaggagggaaagggtgtttaagtttttagttgtttttttttattttttatttttcgttttggttatttttatttatttttttttttttttttttttttttttttttttttttttagagtttgaggtagtcgcgggggaggcggtcgtttttatttttttttatttattttgtttttatttttatttcgtttttatttttcgttcgttacgggtcggttatttgttcgtcgaagcggttgattacggtttggatttattttatcggtttgtgcgcggttatgtttttttcgcggtcggggggcggcggagggaagggtgggtcggcgttttgggtcgggaagagggcggggagcggaggttgaggtgagggaagaggtaaggagagggtttgtggagtgtaggtttttagtgtttttacgggggtggggatggggggttagcgtcgagcgggagggggagagggaaagggggcgttggtaaggaggttggggggagggggataggggaaggggattcggggaggggagggggttttttggtcgttttttttattagcgtcgtttttttatagttattatagttcgagacgtcgttatgatattttatcggaagtgggattttttttacggttcggggagagggagcgcgagcgagttagagattgagagcgcggttgggaaaggggagggggaagcgagagggaaggcggtttntcgcgtatgcgttcgcgtcggtcggttttattaatgaaaaagcgagtttttttggaggtgacgttatttaatttttttgggtcgtttggcgagcgttttttatcgtcgtggggtttatttagattggcgttgggtttagttggcgagtgttagagttgattcgggagtatttatttttatttttatcgttttttatagttgttttttttttcgtcggttttcgggtttggattgttttcggagttggaagttagggcgttttggggttagttttttttttagcgcgcggatttttgtcgttaattttttggggaggttgtgtttttagtttaagtttttagaaaaaataaggtatacgattttcgatttttaggtttttcgtagtttggtagattgttgagaaataaaaaaggaaggttaaagagagatttcgtgattttttttttttagaggtcgtttaaattttaatgttagattcggtggtaattaaggtttagttattaggtttagtattgggatttaagtttagtttttttttgtaaaatttatagttatttaagttaatataattattgtatagttgatgagagatttaagttttattatttttaaaatatttttaaggttttgtatttattattaatttaatatatttatcgttttatttaaatttttgaataaatttttttaatatatattattaattttatgaattgatgaatacgttacgtttttattttcgtgggaacgttgggagtttgtattttttttttagatttttgatttgtttaaggtttgagttgataggtggtaaagttaggatgtaaattaacgtggtttaatttttagaataatagaggtagattatgggttttttaaaataaagtttttttttatatttttaatattagagttgaaaggattttatgtgtaattgggttgtgttagttttttaggaagaggattatatttaaaataacggataatttatgtttgatattggattttggaatgattaatttttttttttttttttttaagatagagttttattttgttatttaggttggagtgtagaggcgcgatttcggtttattgtaattttcgtttttcggttgaagtgatttttttgttttagtttttcgagtagttgggattataggtatgcgttattatagtcggttaatttttgtatttttagtagagacggtgttttattatattggttaggttggttttgaatttttgattttatgattcgtttattttagttttttaaagtattgggattataggtgtgagttatcgtatttggtttggaatgagtaattttaaaatttgtttttttcgatatattttatttaggtaaatgtttttgttttttagagataaggtttgattttgtgtagtggagtgtagtggtttaattatagtttattttagttttagatttttgggtcgaagtgatttttttattttaagtttttgaatagttgggattataggtgagtgttattttgttttggttaattttttttttttttttttttttggtagagatatagttttgttatgttgtttaggttggtttggaatttttggttttaagtgatttttttgttttggttttttaaagtgttgggatgataggggtgagttattatataggtttttaggttaatgttaaaatgaatttatatattttaagtacgcgttaattagttagttaagttatatagatattgggtgataagggagaataaaattagaattttaatttttttatagaaaagttataaagttagtagtttatatatagagagatatatttttgagaaaagtttttaatttttaggttggtggttgtttaaaatatatattaaattaatgttttattttattagaatagatagatagtttggatatgttttttgtttttttttttttaaggatgtaatgtagatattaattttttttagatgatgttagaatgatgattatgttggaaagaaatggatgaatattaaatgaatgtttatttatgttttttttaagtaggatttttgaaaaagtatttatttatatttttaagatagtattttagtgttttttattgtattgttaaattttagatttatgattttttttttttttttttatattttttttgaaagtttttaattatttttttgttgttatggttttttgtttgtttatttttttgatttttttttttatattggatgtaattgtttaaatttttagtttttttgttttttttggtatttcgttgttgaagtttttttgtgttttttttttttttttttttttagtttagtttattattgtttatttttttttagttttgtggtaagatatttaaattttaggttttggttttttgtttttttttttttatttaagtttttgttagtatgttattaatttattttaatttgtattttttgttttgttgtttttttttagtgttaaattttttattatagttagaggtttagattttattttaattttttttttaattaaatttatttagttttgttgaattagtattaagtgtttaaatgggtcggtcgtggtggtttatatttataatgttagtatttttagaggtcgaggtgggaggattgtttgagtttagaagtttagattagtttgggtaatatagtgagattttagtttttattaaaaaaaattatttaaattagttaggtatagtggtgtgtatttgtggttttagtaatttgggaggttgaggtgggaggattatttgagttagagaggttaaggttgtagtgagttgtgatttcgttattgtattttagtttaggtaatagagtaagattttgtttttaaaaaataaataaaaataaaagtatttaaatgtttgttatgtattatgtattttgttagattatatatagtatatatggtaggaatgttaaataaaagtgttaaagaagattggacgttgtggtttatgtttgtaattttagtattttgggaggtcgaggtaggtagattatttgaggttaggagtttgagattagtttggttaatgtggtgaaattttatttttattaaaaaaaaaaaaaaaaaaaaaaaaagtcgggtatggtggtatatggttgtaattttaattatttattagggtgattgaggtaggagaattgtttgaatttaggaggttgaggttttagtgagtttagattgtgttgttgtaatttagtttgggcgatagagtgattttattttaaaaaaaaaatgttaaagaaggtaatgtatagagattgtggtgaattaagaagtatatatttatttttatttatttagataagagatattttttttatttaaagagtatttgttatttaattttagttattgttatgtaggaatgttgatttagtgttgttagattttttagttatttaagagaagttagagatttgaatttatatgtaaatttttttaatttttatatagtggtagttaatttatattttttaaatgttgtgtagttaaataaaatacgtttgttgtttgaatgtagtttatggaatattagtttgattagtattagtttagtgaaaaggtatgagttttatagtagaatagaattagatttgtattttaattttttttattttgtattgtttaatagtatttagggaatttttagtgtttcgtattgttttaaatgtattttttttatttagtttttgttttttggttaggtaataagttttgttaatttttttttcgaagagttttgttttaagttgggagtcgtggtttatgtttgttattttagtattttgggaggttaaggtgggtggattatttgagtttaggagttttagattattttgggtaatatggcgaaattttatttttataaaatttttttttttaattagttgggtatggtggtatgtgtttgtggttttagttatttgggaagttgaagtgggaggatcgtttgagtttaggaggttaaggttatagtgagttgtgatggtgttattgtattttagtattttagttcgggtattagagttagattttgttttaaaaaataaataaatgaataaatataaataaaaaataaaaagtttttatagtagtattttttttattttgtttattatttttatttttattggtataattaattattttagtatattaaagagtatattattttttaggattaaggtgtttatttttttagttgttgggcgtattatttgttaatatttattagttaaatttttttttaggagttgtttttagttgaagaaagttgttttttattaggttcgtttgtattgattggtagatgtagggtttagggtggggttgttttgaagggtttttttggtattagagtttttttaggattcggaagttgaggtatttgttgtaattatatttagtttaattttttttgtttaattttattttttttttgtacggtgttgattttaagggtaattaaatttatgagtgtggtcggatattatggtttagatttgtaattttagtattttaggagttgaggtaggtggatcgcgtgagtttaagagtttaagattagtttgattaatatggtaaaatcgtatttttataaaaaataaaaaaatttgttggatatggcggtgagtagttgttattttagttatttaggaggttgaagttggaggattgtttgattttaggaggtagaggttgtagtgagttatgtttgtattatt

SEQ ID NO: 37 - DNA, 8693 bp, Artificial Sequence
  chemically treated genomic DNA (Homo sapiens)
agtttggataagatagcgagatttcgttttaaaaaaaaaaaaaaaaaaaagtataggaatgaggtattggagttagtagttgtagttttttaagagttaagttttttgtattggaggatatttagtgtatatgtgttattgatggttatggtttgagtaggtagtttgagttttttaggttgttttgagggtttttgttgatgcgagtttttattgaaaagtttagttgaggatattgtgttgaggaggttgtgggagggaggaagtatcgagtcgggtatgggagttttttcgttgtttgtgagttttttttttttgttgaattagtttttatttgattttttttaatcgttaggtgatagagattaggaagaaagaggttttatatatgtttttcgaggatgtgtttgtggagaggtttaggtgaggagaggacgggggacgtggttagggatttttagggtagttgagtaagtaggtgggtggtttgaggttaggaggggttaatgttaggaggtttagatttttgtggatttaagggtagaaggtgggttttgttgtggtttaggagttttgggtaaagtttaattttattatattattgtagtttatgtttcgagtatgtaatgttgagttatgtttgtagatgagatatagttttcgggggttttggttaagtttatgttaaatgtattttggaggagttatttttgataagatattattgtaaatttaagtaatgttttcggattatagtgggtgttgtgggttagtgttattttaatattagaggaatttaagggaaagatgttttgtaaaattaaaatgtttaatagtaggggatggttttataaattatggtttatttatatagtagataattatgataatgttttagaagaatatttaatgtaaaatatttattatataaataggttaataaaatagattatagaatagcgggtggggaaggggatatttgtgtatatttaaaaatacgggattaagttgggtgcggtggtttacgtttgtaggtttagcgatttagaagattgagtaggaggattttttgagtttatgagttcgagataattatgggtcgtaaagtaagaatttatttttataaaaaatgtttaaaaattttgttcgggttggtatagtgatttacgtttgtaattttagtattttgggaggttaaggtgggcggattatttgaggttagaagttcgagattattttggttaatatggtgaaattttatttttattaaaaatataaaaattagttaggtatggtggcgtatatttgtagttttagttattttattcgggaggttgaggtaggagaatttgtttgaatttaggaggtaaaggttgtagtgagtcgagattatgttattgtattttagtttgggtaatagagtaagattttgtttaaaaaaaaaaaaaaaaaattaggtcggttatagtggtttatgtttatgtaattttagtattagtattttgggtggttgaggcgggtagattatttgagattaggagttggagattagtttggttaatatagtaaaattttgtttttattaaaaatataaaaattagttaggtgtggtggcgtgcgtatgtaattttagttatttgggaggttgaggtaggagaatcgtttgaatttgggaggtagaggttgtagtgagttgagattatgttattgtattttagtttgggtaatagggagagatttggtttaagaaataattataataataaataaataaataaataaaattagttaggtatggtggagcgtatttgttgggaggtagagtaggaagattattttagtttggtaggttaaggttgtagtgtgttatgatggtgtttgtgaatagttattgtattttagtttgggaaatatagtgaggattttgtttttaaaaaataaaaagggggagggaagatggatttttaatttgttttatgagaatagtataattttttgatatttaaattagataagaattttataagaaaggaaaattataggtttattttatgaatattaatgtaaatgttttaaataaaatattagtaaattgagtttagtgttttttgtataaggataatatattataattaaattgggtttaatttaagaagttatggtaggtttaatattaaaaaattaataatgtaataatttattatattattagaataaaggtgaaaaattatgttatgttagataattaaaggtatttgttttaggtttttaaagaggagttagtggtataaggatgtaagggtagtggtgatttttttttagtggtattagttgaagtgagaatggtagcgttttattttggggatagaagtgacgtttatgttagacgtttgtggttttgatatgttttttgtggttttttgtggtttgttttttttttttttattggatgtgattttggttatggttttagttatattgtgtttttgtttatttttagattttggttttttaatttgtttagtgatttttttttttttttagatggagttttgttgtgtcgttaggttggagtgtagtggcgcgatttcggtttatcgtaattttcgttttttaggtttaagcgatttttttgttttagttattcgagtagttgggattataggtgtgcgttattacgttcggttaatttttgtatttttagtagagacggggtttcgttattttggttaggaatgtttttattttttgatttcgtgatttgtttaatttagttttttagagtgttgggattataggcgtgagttattgtgtttcgtttatttagtgattttaaatgtagtttaatggttttttagtttatggaggttaaagtaggttttgttgtattaaattaagaaattgggttgggtgtggtggttaatatttgtaattttagtattttaggatattgatgtggattatttgagtttaggagtttgagattagtttaggtaatatagtgaaattttgtttttattaaaaataaaaataaaaataaaataaaaaattaaaatttaaaattagttgggtatggtggtatgtatttgtggttttaggtatttaggaggttgaagtatgaggattatttgagtttaggaggtggaggttgtagtgagtagtgtttatattgttgtattttagtttgggtaatagagtgagattttaatttaaaaataaataaatagaatgagagagagagagaagaaaagaaagaaggaatttagttaaagaagttgggtttatttggattttttttggtttgttttatttgttgttattagtagttttttgaagttataaaaataatataaagtaaaataaggtaaaattattatttgtttgaaagagtttataaatttgatggtggtcgtggggtggatggaagattaaaaaaatggggatagaagtgaattagtgtaagttatttgtattgataagatggggatggatttttgtggaaggtagaggaggttatgttttatgtttttggtaggaaaagtggttaaagagggttttagagaataggggttgatggatgggttatattttgatgtgagttaagtttttggatggttggagagaggaaggatgttttagttgggggaatagtttggataatggagatttaagaaagttatgttttagtagtgtgaatgttgtggatgttgaagtgttaggatgtaaggtggagaattgggaaatggttttggaaaggggcgaaagtcgggtgatgaagtattttgtttattgtgacggagtttggattttttttgtggtttaaagggaaaggattgttgaatgtaaagttaatgttattagaaaagttgaatttataagagagttttggagtttaaaagagtattttatggggaattaggaaagttttggtatttggtagattaagtaagtgttttgatttgaagtttagtttagttttaatatttttttttatatttattatatcgtataatttggttttgtttatttattttaggttaaggtagagttttttagtttggtttgagtgttgtatttttttttttggtttgatatttggaattaaagttaagttagaattttagggttaagggggatgttgaaaattgtttgagtttttagattattttgttagtttatggtaaagggagggattagaggttatagggaaagtattttagttgttttttatagtattattttttttttatttaatggtttaggttaataggattttttttttgaggtttgggatacggaagggagttttttttaaattaggtttttggagagtaggttttaggggagtagtgtaatttatttttatatttataagacggtttttgatttttgttttttttttttttttttaaagtggaatagagagaatatgattttttacgatttttatattatagtttttaaataatggggaaatcggaggttttttcgtgtgtagacggtgatatttatcgttaaatgcgaattaggtagatgttagttttagtacgtacgtaggtaattttattttcgttttaacgattttagaggttgttcggtttgttttatacgggggtgttaagtttttcgttcgttttaagcggagatttaacgttatttataattaagttttttttgagggcgagcggttaggtgcgttttcggtaggatagtgttaattttagtttttttttagcgcgttttttcgcgttcgtttttcgtttggaagttttttttttacgtttcgcggtttttttttttttggttcggggagttgttttttgtgttgtcgggaaggttaaagtttcgcgtttattaggagagttcggtaagtatataaggatagaggagcgcgggattaagcggcggcgaaggaggggaagaagagtcgcgatcgagagaggtcgtcgagcgttttcgtttttagagagtagtttttcgagataggtaagggcgtagcgtgggggattcgtgtttttttttcgggattttttgttttcgttttcgcgatgtagtcggtcggtttcggtttcgaaggcggatttgggcgtttttggtttttcgcggtttcgagttttcgataaattttttgcgtcgattgcggtatgagaagtcgttagtagttgagttggagggtttacgttcggtttttgggcggacggtcgcgaagttgtaggcgttgtttttagggagtcggcggtttttttttttttaggggttcgcggcggttcggaggtttcgagagtttgttaggaggttttgggataattcggtttttttttttttttttgagacggagtttcgtttttgttgtttatgttggagagtaaaggggtgatttttgtttatcgtaattttcgtttttcgggtttaagcgatttttttgttttagtttttcgagtagttgggattataggtatgcgttattacgttcggttaatttttgtatttttagtagagacggagtttttttatgttggttaggttggttttaaattttcgataataggtgattcgttcgttttggttttttaaagttttggtattataggcgcgagttatcgttttcggttagttcggttttttagtattttttgtttttagtttttaggataggtgttatattttgaaagttaaattttatatacgttatcgtaaattaatgttggaaacggggtagtagagaaaaggataaaagttataatgaacgttttgtttttcggattttttcggatttagatttttgaatttttgtttttttgtttattttagcgtattcgaggtggtcgcgttatgataattatatgataattgggttaattataatgtagaatagttgggttttttttttttaagatttagttggggttaaaaataggtggtcggggcgggatttgttttagattttgaaacgtattgtttagtttcggatgttttaatagaatcggggtggacggtttatggcgtagattttgggttgagggtacgggtagttatttaggaatgattaaggtttaggtaagggggcgtttttagcgaaggagagatagtttatttggtatttggattttttaaattttttatgtttaaatggggtagggagggtttttatagaatggttggaaggagttaaggaaaataaaagtgtgtgtggattttttttgtgtgtgtgttagtttataaattttgtatagattatggttattttaatgatttattgtttttttgatgtttttgttataggattcgatgtatgtatgttatggtgtaaggataaaattcggtttttgtgtttttttaatttttataaaaggttatggttagcgtgtagttttatagtaataagtaaaatgatttgttgagtttatagagagttttttatatttatgaagttttaataagtgtagttttattataaagttaattttaggatgagtaaattttaagtttttatttttttagagttttttatttttggattataatattttttttatttaaaaaagtataatatttgatatttttttaataatttgttgttttaaaaatgatataaaaggtattatttgtttattgtagagaattgaaaatatatataagtaaatatatatatatataagtaaaatatataatataaatataagattattttttagggaagaatttgaagttttagtaatagtagttatttaattagtttagtaatagaatataagttttgagagggtgggagtgaatatgttattatattgtataatatagtatatagggtataaggaggggaaatgttttttggggttttttaggaaggtttgaagttattgtttttagtaaatggaaattattttagagtagttatttttgataagaattgaaatataattgagggaattattagatttgtaagattttgtttttttttttattaatatgttattttatatttgtatttggtgatatacgtaattattatttttttgtgattgtaatatttgggtattttttagagttaaatgtgttatggttaatttggagttttaatttaattgtttggtttattaagttttggttgtgtatttgaatagattattggtagggtataatgggaatagtttgttttttggagttaggagaggatattaaggttgattaaagttcgtttagttgtttttttagtcgaagcgtatttgggttagttattggttgttagtgttatttaatggttgttttgaaaatgtttagttttgttcggtaattttttagaagttagtatcgtgtaggtttagcgtttggggaatagggcgagggtggggtagagagaaggaagtggttttttgaagtagaaattagcgttttagaggatttttatttttaaagttttttttatataaaaaagatttggtttacgtttttttaaatgagagatttattttaggtaaatttattttaaaatgttagcgtttattaggagtgataagatatttagttatttacgttttaatgtgaattattttttttatttaattatatttttttttagtagttggttgagaagattttttgaaatttaaaatgattgtagggttggcggtgagttgattttcggtttcgaggtggttttagggggtttatttggttaagggaaatttggtagtgcgagggtagtgttggagagaggggtgggtatagggggttaggggtattatggatgttttttttttattgttttttggtgttttgattttagtttttgtttataggtatttgttggattttttaaaagtatttgtagtggttgttttattaggaggtaatttttttttggttttttttttttttatatttgtattttttttaaattttgttattttagattatatttgagagttttagagaataagatatttgatacgtgacgtgtttagaagatgagttagattttaaagaattgagatttgttttaaaaacgaagttttttaaagttattggagtttgggtaatagtgattattagagtaatttgtgtgtaggatattaaattaggttgttcgaaatgttgtttaaattggttagtggttttatttgtttttttgttaatttaatatttataggaaatagagttttagaggaatgataggattttggtggaataaaaagggaaaagattattttgagtaggagttttagggtttttcgttttttttaagttatttttatttttgagattttgtatgttagaattatagtttaatgtagtgaaataggaaagttttttgttaggagtttagttttattttgttatggatattaaagtaattgtttttttttgggttttaatttttttattttttatgggaagggttgaattaagtaatttttaaaatagtttttagttttaatttttttaggggtttcgtttaaatagaagataatagggaaatggttatagtttatttattatttttttttttttattataatttatattatcgttgtattgtatatttttttttttagtattgttgttgtttttaaaatgtttttaattttataagagagtgtgttgttaatgttggtttaaggttttttttggtgagtggttaatattgttttgttttttgtaggggttttattaattttgtttgtttttgtaga

SEQ ID NO: 38 - DNA, 8693 bp, Artificial Sequence
  chemically treated genomic DNA (Homo sapiens)
tttgtagaagtaaataagattggtgggatttttgtaaggagtaaaataatgttggttatttattaggaaggattttgagttaatattaataatatatttttttgtggagttaaaggtattttaaggatagtagtaatgttgagaaaggaggtgtgtagtatagcggtggtataagttgtgataaggaggagggaatggtgggtaaattgtgattatttttttgttattttttatttaaacgagatttttaaaaaggttaaggttggaagttattttggggattgtttggtttagttttttttatgagagatgggaaaattgaagtttaaagagagataattattttaatgtttatgataaggtaaggttaagtttttaatagagaatttttttattttattatattaagttgtagttttaatatgtaagattttaggagtgaaagtaatttgggaaaaacggaggattttgaaatttttgtttaagatggttttttttttttttattttattaggattttattatttttttgaaattttattttttatgaatattaggttgatagaaaagtaaataaaattattggttaatttaggtagtatttcgagtagtttgatttgatgttttgtatataaattattttggtgattattattatttagattttagtaattttggagagtttcgtttttaaagtagattttagttttttgaaatttggtttattttttggatacgttacgtgttagatgttttgttttttagagtttttaaatgtggtttgaaatggtaggatttgaagaggatgtagatgtggaggggaaagagattagaagggaattattttttggtggaatagttattgtagatatttttggagaatttagtaagtgtttgtgggtagaagttgaggttaagatattaggggatagtaaggagggggtatttatggtgtttttagttttttgtatttatttttttttttagtattattttcgtattgttaaattttttttaattaggtgggttttttgaagttatttcgaggtcggagattagtttatcgttaattttataattattttggattttagaagatttttttagttagttgttagaaagaaatgtaattagatgagaaaagtaatttatattaaagcgtggatgattaagtgttttgttatttttaatgaacgttggtattttaaaataagtttgtttaaaataaattttttatttggggaggcgtgggttaaattttttttatataggggaggttttggaagtgaaagttttttgaagcgttgatttttattttaggaggttatttttttttttttattttattttcgttttattttttaggcgttgggtttgtacggtgttagtttttgaagggttgtcgggtaaggttgagtatttttagagtagttattagatggtattggtagttagtgattggtttaggtgcgtttcggttaaaggggtaattgaacgagttttggttaattttggtgtttttttttggttttaagggataggttgtttttattgtattttgttagtgatttatttaagtatatagttagaatttggtggattaggtaattagattaaagttttaagttgattatagtatatttagttttgaaaaatgtttagatgttatagttatagaaaaatggtagttacgtatgttattaaatgtaaatgtaaagtaatatattagtaaaggaaaaaataaaattttataggtttgatagtttttttaattatattttaatttttgttaaagataattattttggagtgatttttatttgttagaagtaatgattttaggtttttttggaaagttttagagagtattttttttttttatgttttatgtgttgtgttgtataatgtggtaatatatttatttttatttttttagagtttatattttgttgttaaattggttagatggttgttattgttaaaattttagatttttttttgaaagatggttttgtgtttgtattgtatattttgtttatgtgtatgtgtatttgtttatgtgtatttttagttttttataatgaataaatagtattttttgtgttatttttaaagtaataaattattggggaaatattaaatgttgtgtttttttaagtagggaaagtattataatttaaaaatggaaagttttggaaaaatagaaatttgaaatttgtttattttgagattaattttatagtagaattatatttattagaattttataggtgtgaggggttttttatgagtttaataaattattttgtttgttattgtaaaattgtacgttggttatgattttttgtaaagattagaggagtataggggtcgagttttgtttttatattatgatatatatgtatcgagttttataataaaagtattaaaggaatagtaagttattaaagtggttataatttgtgtagagtttataaattgatatatatataaaaaaaatttatatatatttttattttttttggttttttttagttattttgtaagaattttttttgttttatttaaatatgaagaatttggggaatttaaatgttaagtggattgtttttttttcgttgaaaacgtttttttatttgagttttgattatttttaaatggttgttcgtgtttttaatttaggatttgcgttataaatcgtttatttcggttttgttgaggtattcgaaattagatagtgcgttttaggatttaggataagtttcgtttcggttatttgtttttaattttagttaggttttggagagaagagatttaattattttgtattgtaattgatttagttattatgtaattattatagcgcggttatttcgggtgcgttaaggtgggtaaggaaataaggatttaggggtttgaattcgaaaaaattcggaaggtagggcgtttattatgatttttatttttttttttgttgtttcgtttttaatattaatttgcgatagcgtgtatggaatttgatttttaagatgtgatatttattttggaaattgggagtaagagatattaaaagatcgggttggtcgggggcggtggttcgcgtttgtaatgttagaattttggggggttaaggcgggcggattatttgttgtcgggagtttgagattagtttgattaatatggagaaatttcgtttttattaaaaatataaaaattagtcgggcgtggtggcgtatgtttgtaattttagttattcgggaggttgaagtaggagaatcgtttgaattcgggaggcgaaggttgcggtgagtagagattatttttttgttttttagtatgggtaataagagcgaaatttcgttttaaaaaaaaaaaaaaagatcgggttgttttaagattttttagtaagttttcggagttttcggatcgtcgcgagtttttgggggagaggaggtcgtcggttttttggagatagcgtttgtagtttcgcggtcgttcgtttaggggtcggacgtgggttttttagtttagttattggcggttttttatgtcgtagtcggcgtagaaagtttgtcgagaattcgggatcgcggagagttagaggcgtttaggttcgttttcggagtcggagtcggtcgattgtatcgcgaggacggggataggggatttcggggaaagagtacgggttttttacgttgcgtttttatttgtttcgggaggttgttttttgagggcggggacgttcggcggtttttttcggtcgcggtttttttttttttttttcgtcgtcgtttggtttcgcgtttttttgtttttatatatttgtcgagtttttttggtgggcgcgggattttgattttttcggtagtataaggagtagtttttcgggttaggggaaggggggtcgcggggcgtgggaggggggtttttagacgggggacgagcgcggggagacgcgttggaaaggggttggaattagtattgttttgtcgaaggcgtatttggtcgttcgtttttaggaagaatttaattatggatggcgttgggttttcgtttagaacgggcgggaggtttagtattttcgtgtggggtaggtcgggtagtttttgaggtcgttgaggcgagggtgaagttatttgcgtgcgtgttggggttggtatttgtttggttcgtatttggcggtaaatattatcgtttgtatacggggaggttttcgatttttttattgtttggaaattgtgatgtggaagtcgtggggaattatattttttttgttttattttggggaggggaggagggagtagaagttaggagtcgttttgtgggtgtgaaggtgagttgtattgtttttttggggtttgttttttaagggtttggtttaggggaggttttttttcgtgttttaagttttaaggaaaaagttttgttaatttaaattattaaatggggagagggtgatgttgtgaagagtagttgaagtgttttttttgtggtttttgatttttttttttgttatgagttggtagggtggtttggggatttagataatttttaatattttttttggttttggagttttggtttggttttagttttaaatattagattagagagaagagtatagtatttaaattaagttaagagattttattttaatttggagtaaataaataaaattaaattgtgcgatgtggtgggtgtgggagggagtattgggattaaattggattttaaattaagatatttgtttaatttgttaaatgttagaatttttttgattttttatgagatgtttttttggattttaggatttttttgtggatttagtttttttggtgatattggttttatatttagtaattttttttttttggattataagagagatttaagtttcgttatagtagataaggtgttttattattcggttttcgtttttttttagggttattttttagttttttattttgtattttggtattttagtatttataatatttatattgttagaatatggtttttttgggtttttattgtttaagttgtttttttaattagaatattttttttttttttagttatttaggagtttgatttatattaagatgtagtttatttattagtttttgttttttgaagttttttttggttattttttttattaggggtatgaggtatgattttttttgttttttatagaagtttatttttattttgttagtgtaagtggtttgtattaatttatttttgtttttatttttttaattttttatttattttacgattattattaggtttgtaaatttttttaagtagatggtggttttgttttattttattttgtgttatttttgtaattttaggaggttgttggtggtagtagataaaataaattaggaaaaatttaaatggatttaatttttttaattgggtttttttttttttttttttttttttttttttattttgtttgtttgtttttgaattagggttttattttgttgtttaggttggaatgtagtagtgtgaatattgtttattgtagtttttattttttgggtttaagtgatttttatgttttagttttttgagtatttggaattatagatgtatgttattatgtttagttaattttgggttttggttttttgttttgtttttgtttttgtttttggtagagatagggttttattatgttgtttaggttggttttaagtttttgggtttaagtaatttatattagtattttgaagtgttgggattataggtgttagttattatatttagtttagttttttaatttaatgtagtagaatttgttttggtttttatgaattgaaaggttattgaattgtatttagaattattgggtaggcggggtatagtggtttacgtttgtaattttagtattttgggaggttgagttgggtagattacgaggttaagagatggagatatttttggttaagatggcgaaatttcgtttttattaaaaatataaaaattagtcgggcgtggtggcgtatatttgtagttttagttattcgggtggttgaggtaggagaatcgtttgaatttgggaggcggaggttgcggtgagtcgagatcgcgttattgtattttagtttggcgatatagtaagattttatttaaaaaaaaaaaaaaattattgggtaggttgggggattaggatttaaaaatgggtagggatatagtgtggttggaattatggttaaaattatatttagtggagaaaaaaaaaatagattataaggggttataaggggtatgttaagattataggcgtttgatatagacgttatttttgtttttaggatgggacgttgttatttttattttagttaatgttattagaaaggagttattattgtttttgtatttttgtattattagtttttttttgaaagtttagaataggtgtttttgattgtttgatatgatataattttttatttttattttagtaatgtggtgaattattgtattgttgattttttggtgttaaatttattatggttttttagattaaatttaatttgattatgatgtattatttttatatagaaagtattggatttaatttgttaatattttatttaagatatttgtattgatgtttatgagatgggtttgtaattttttttttttgtggaatttttgtttaatttgagtattaaaaaattatgttgtttttataaaataagttggaaatttattttttttttttttttttattttttaaagatagggtttttattgtgttttttaggttggagtgtagtggttatttataggtattattatagtatattatagttttgatttgttaggttaaagtgatttttttgttttgttttttaataggtacgttttattatatttggttaattttatttatttatttatttattattataattattttttagattaagtttttttttgttgtttaggttggagtgtagtgatatgattttagtttattgtaatttttgttttttaggtttaagcgatttttttgttttagttttttaagtagttgggattatatgcgtacgttattatatttggttaatttttgtatttttagtagagatagggttttattgtgttggttaggttagtttttaatttttgattttaagtgatttgttcgttttaattatttaaagtgttagtgttgggattatataggtataagttattgtgatcggtttaattttttttttttttttttagatagagttttgttttgttgtttaggttggagtgtagtggtatgatttcggtttattgtaatttttgttttttggatttaagtagatttttttgttttagtttttcgagtagagtagttgggattataggtgtgcgttattatatttggttaatttttgtatttttagtagagatggggttttattatgttggttaggatggtttcgaatttttgattttaagtgattcgtttattttagttttttaaagtgttgggattataggcgtgagttattgtgttagttcgggtaaaatttttaaatattttttgtagagatgggtttttgttttgcggtttatggttgtttcgaatttatgggtttaagagatttttttgtttagttttttgagtcgttgggtttgtaggcgtgagttatcgtatttagtttagtttcgtatttttaaatatatatagatatttttttttttattcgttgttttgtgatttattttattgatttatttatgtaatgggtattttatattaaatatttttttaaaatattgttatgattgtttattgtatggatgggttataatttataaagttattttttattgttagatattttggttttgtaaaatattttttttttgagtttttttgatgttgaaatgatattggtttatagtatttattatgattcgaaaatattatttggatttatagtaatgttttgttaggaatgatttttttaggatgtatttagtatgggtttggttaaagttttcggaggttgtgttttatttgtaaatatggtttagtattgtatgttcgaggtatggattgtagtaatgtgatggggttgaattttatttaggatttttggattatagtagagtttattttttgtttttgagtttatagaagtttgagttttttggtattgattttttttgattttagattatttatttgtttatttagttgttttggggatttttgattacgtttttcgttttttttttatttgggtttttttataaatatattttcggggagtatgtatggagtttttttttttttggtttttattatttggcggttgggaggaattagataagagttggtttagtagggagagggagtttataggtaacgaaagagtttttatgttcggttcggtgtttttttttttttatagtttttttagtatagtgtttttagttgagttttttagtggaaattcgtattaatagggatttttagggtagtttgagaagtttaagttgtttgtttaggttatggttattaatgatatatgtgtattaagtgttttttaatgtagggaatttaatttttaagagattgtagttgttggttttaatgttttatttttatgtttttttttttttttttttttgagacggagtttcgttgttttgtttaggtt

SEQ ID NO: 39 - DNA, 8085 bp, Artificial Sequence
  chemically treated genomic DNA (Homo sapiens)
  unsure (2545)
gttttatgatttaattattttttaatatttttttttattaagattattatattggtgattgggttttgatatatagatttggggagaatataaatatttatattatagtatttattaatttatttagttattttattgttaggtatttatttagaaaaaatgaaaatatatgtttatataaagatttgtataatatttttatagtagttttatttataatattaaaaaaattggaaataatttagatatttatttatagttaaatggataaataaattatagtatataaataaaaagaataaaaagaattaattattgatatatattataatttagttgaattttaaaataattatgttgagtgagagaaattaaatgaaaaaaagatatattatattatatataattttaagaaataaaatttaatttatttggtatttagatttttatttttatattagttttaaataaaaagttttaaatttttttggataaatggttgattttacgattggggtaggaaatatataagatgagtttgatgagtttgtagtattttgtaatattagaaagtaggaaagtttatatatatatatatatatatataatatagagagtgggttaaggagtataagagttaattgaaaaagtttttagtgttaaaaattggaaaaatttgagtaataaagtatttatgaatttatataaagaaaagattgaataaagaagtaaatgggggagaagaagtaaattttttttatagaattttaaataaattatgtagatattttattttaaaggagggttagtataattttttatttttttatatttttttaagtgatttataatgatttttttttaaagagtatagagtatgtaaagagggaaaaaagagtaattatgtaatggagaaatttgataaatattattttagttaggtgatggagaataatattaatagttataagttatgttgataatatgtattttttatatgatgtaataaatatagtatattatttttttgatttttatttcgttaaaatttaaaattttagtttatttatgaggatatattaaattttaatagaagggtattttgtaatatattttattagtatttttaaggattgttaaggttattaaatataaggaaaatttgagaaatttttatagttaagaggagtataagatattataataattaaatgtggtgttttggatggaattttggaaaggaaaaaggatattaagtgaaaatgaagaaaatttaaataaattatgaatattagttaataataatttattagtattagtttattaattgtaataaatgtattttattaatttaaaatgttaatagagaaaattgtataaatgatatatgagtattttttatattatttgtttaatttttttgtaaatttaaaatcgttttttaaaagtaaaatttattaataaaatatttaaagtaaatagatttaaaaggtatatgtaaatgtataatttaatgtttaataaattagatataaatatttttaaaaatttaatatttggtgatagaaagtagattagtggtttgttagaaagtggtgattagtattaggggaaggggatgggatagaatagtatgaagggatttaaaaaatggtatgaggaaatttttggaggtaaagggtatgtttattattttagttttataggtttaataataaattatataatttaaatatatgtagtttattatatgataattatattttgataaagtggtttttttttttaaattatagaaaaaatatttttatatttaaatttttttttttaaaaatagtttttaggaatatttgaagttagttttattatatttgaatttaattagtgaattttgtttatttaaagatttatatatttgggaagtttttgtgttaaaaatgttaattatttagtattaaaatttatggaataatggtgatttaggatatgttggatatttttattgttgtttttttattttaagatttttaattttttggaaataatttttttagatattttgataagggaattattataattaattaaaattaagttaaatatagtttgttagatttaaaatgaggttaagtgttaattttatagtagcgatcggaaaattaaattatatggtatttgatatttaaaattatatttttaagaaggttgttatttgatgttttgggtttgggttatagtatttaattttataatattgggtaattttgtgttttagtttttttaattatgaaattgggataatagtatttattttgtgagattgttgaaggattatagttaatataggtaaaaggtttataagattatttggtaatgttgttttgattttataaattttatatattgtgtggtattagttattaggaaaatataaataaattagtgagatattattttatatatttggggggttataataaaaaagatagataaaaaatgttgttaaagatgtgaagaaattaggatttttatttattgttggtgnaaatgtaagaagtataattatttgaattatagtttggtagttattttaaagattatatttagagttgttatatgaattagtaattttatttttatgtatatatttaggagaaaggaaaatatacgttgtataaaaatttgtatatgaatgtttattagtaggattttttatggtagttaaaaggtgtaaataatttaaatgtttaataattgatagagatggataaataaaatgtggtttatttatataatgaaatattatttgttaataaaaaggagtgaaggagtgaagtattgatttatgtggaatatggatgaattttgatttaaaatagttaaattataggtataaaaagtatattagtggttgttgggagatttaggcggaaatgtggaataattgttagtgggtattgagattttagagttatatttatgttataaaattaatagtgttgatggttgtataattttgagtatatgaaaaattaatgaattgatattttgagtgagttgtatgatattggaattatattttaataaagtatggtaattgttttaagataggttggaaagagaaagtttgaaaataataataatgatattaataaattagtttatttttttagttttatatatttttgtgtttatatttgtttttgttttatttataatggtttttttgtagttgttatattatattttgttatttgatgttcggtgaatattttatatttgttttttagaattttttttattttttttttatttgtttaatttttatatatttaaaattaattagagtaaattatttattagaataattaattttaaattttagtaatttaatatgataaaggtttgttttttatttatatagtttttttttagatgatcgaggggtttaggttttttatttttagtggtttttttattttttggagttttttgtattttttatatatggttgagataaattatgagttattagtatagttagattttgaggttttataagaaaatttgtaaattatttattttgttttgaataaggtatatttaagatgatgttaaaatatttaatggttttgggttaaatatagtttatgattgtgtatttaaaatatatattgtaatatttttttttttttttattgattttatgaatttagcggggatttattttataagtttaaagataattattttttagattaagaatatttagggtaaaaagtattgtttaatatttttattgaggatgttatgatgtagtatattgtataagttggagttaaaggaaattttttttaaagtgttatttattaaaaattggaatatattttttaagataaatcgaagtgtggtatataatatttaaatttttattatagatatagaggtgttattattttttatttttaaatttttttgttacgttgaggatatttaagaggagtaggatatgttggtcgtagtaggagaaatttgaaagtatttatttttatggaatttataagggagagaattttttattttagtatcgtttttgatatatttattattttaaaagataatgtagttaaatgtttttttttgtgttaaatttttataaaattgaaattttaaaatggtgataaaaattttatttttgatagaatttatttatttttttaattagatagggtataatttttaatttgtaaaataaaacgtaatatgtttatgaggttttattttaaagaatttgttattgagagtagtatttagaataacgggtggaaatgttaattttagagttttagattttatcggtaattggggtagggaggggttttgggcggggtttttttagaggaggaggcgttgttagaaagttgtttggttagtttatagttgttattaatcggggtaagttttgttgtatttgtgcgtgtgggtggtatttttaatgagaattagttttatttgttatttgagtgaaatttataattcgaggcggttagtgttttcgtattattgggatttgagattttcggagatgattgtcgttcgtagtacggagttagtagaagttcgattttttttgggaatgggttgtatcgagaggttcgattagttttagggttttagtgagggggtagtggaatttagcgagggattgagagttttatagtatgtacgagtttgatgttagagaaaaagtcgggagataaaggagtcgcgtgttattaaattgtcgtcgtagtcgtagttatttaagtgtcggatttgtgagtattttgcgtttttagttttcggatagaagttggagaatttttttggagaatttttcgagttaggagacgagattttttaataattattatttttttttgcgttttttatttgtcgttcgttgggataaacgatagttatagtttttttgacgataggatggaggttaagggtaggagttgattagcgtcgttttttttcgttttcgatttaggaggtggagattttttcggtttagttatatttaatatttatttttttttttttttgtttttatattttcgaaatttttttttttttttttttttttttttttttggagacgggggaggagaaaaggggagtttagtcgttatgattgagttgaaggtaaagggttttcgggttttttacgtggcgggcggttcgttttttttcgaggtcggatttttattgttgtgtcgtttagtcgtaggttcgttttcggggagttagatttcggatattttgtttgaagtttcggttatatttatttttttggacgggttatttttttttcggttttgttagggataggattttttcgacgaaaagacgtaggattagtagtcgttgtcggacgtggagggcgtatattttagagttgaagttataaggggtgttggaggtagtagttttagttttttagaaaaggatagcggattgttggatagtgttttggatattttgttggcgtttttaggtttcgggtagagttaatttagttttttcgtttgcgaggttattagtttttggtgtttgtttggtttcgaatttttcgaagatttatcggttgttttcgttatttagcgggtgttgttttcgtttatgagtcggttcgggtgtaaggttggagatagtttcgggacggtagttgtttataaagtgttgtttcggggtttgttattagttcggtagttgttgttttcggtttttgagagtttttattggttcggggttttagtgaagtcgttttcgtaggtcgttgcggtggaggttgaggaggaggatggttttgagttcgaggagtttgcgggttcgtttttgaagggtaaatttcgggttttgggtggcgcggcggttggaggaggagtcgcggttgtttcgtcggggcggtagtaggaggcgtcgttttggtttttaaggaagattttcgttttttagcgtttagggtcgttttggtggagtaggacgcgtcgatcgttcgggacgttttcgttggttattacggtgatggattttatttacgtgtttattttgttttttaattacgttttattggtagttcgtattcggtagttgttggaagacgaaagttacgacggcggggtcggggttgttagcgtttttgtttcgtcgcggagtttattttgtgtttcgtttatttcggtcgttgtaggcgattttttcgattgcgcgtattcgttcgacgtcgagtttaaggacgacgcgtattttttttatagcgatttttagtcgttcgttttaaagataaaggaggaggaggaaggcgcggaggttttcgcgcgtttttcgcgtttttattttgtggtcggtgttaatttcgtagttttttcggatttttcgttggggttatcgttttcgttgtcgtcgcgagcgattttatttagattcggggaagcggcggtgacggtcgtattcgttagtgttttagtttcgtttgcgtttttttcggggtcgattttggagtgtattttgtataaagcggagggcgcgtcgttttagtagggttcgttcgcgtcgtcgttttgtaaggcgtcgggcgcgagcggttgtttgttttcgcgggacggtttgttttttattttcgtttttgtcgtcgtcgtcggggcggttttcgcgttttattttgtattcggttttaacgggttttcgtagttcggttattaggtcgtcgtgtttaaggagggtttgtcgtaggtttattcgttttattttaattatttgaggtgagggttcgggacggggtacgtttagcgcgttcgggagtagcggtttcgttggcggcggcggtcgttaatttttagttttagttttagcgtatcgttgcgtttttcggggcggtcggagagggtgggtagcgggatatagtataggggtagttgtttttttttttttttttttttttttttatttttggggatacgaaggtgggcgtagaatatattatttttggggcgtgtttttttgaaagttgtttttttgtttgttttttaatttttcgaattttttagatttcgaagtagaattaatttcgatttaaaacgtgtagcgttatattaggttcgttgtagtttagtggggtagaaagtgcgcggcgagttgggggttttatgaaatgttttttttttagaagaaggacgtttattaggagtgtttgttttggagaggagttaaggtatcgttttttcgggaggggtgggatttgagaggtggtcggttagaatcgaaagtagtattattttagggatttgaatattttagtggtttagtttttttaagaattttaagattaaaattaagtttacgtgggaaatgtttaaattgtggatttaaacgtttgttattgtattgtatcgtttttttattattgtttgttatttattataattttttttatatataggtttaaaaaatattattttgtatattgaagtaatggaatgtaaaaaaagaatgttttgtttggaattttatgttgtgaataggtaaaatagtgttagtgtattggataatattttaaaatgataaatatatatttgtttaagtaagtaatgattatagggttgtgttttaaaaatttaaaattaaaatattgtaaagtattatcgaatttttaaagttaaattatatttgttttgatttagtatatagataggaaggatataatattttatttgttaaagattaaattgtttttatataaagagttttgtagaaagatttttttttaatcgattttaattttttaggatataatattatatattaattattgtttttttatattggtgttattgatgaatggttaattatttgtaagtatggtgaatttagttacggatagtttattattaagtttagtttgtatgttttttaagtgtatatatatagttttgtttttaaaatttttttttattttgttaatattggtttaagaaatttttagtattagatagtggtgtatttaaaaataaatggagtattttgttttgtattttaagg

SEQ ID NO: 40 - DNA, 8085 bp, Artificial Sequence
  chemically treated genomic DNA (Homo sapiens)
  unsure (5541)
ttttgaaatgtaaaataaagtattttatttatttttaagtgtattattatttaatattaaaggttttttaaattagtattaatagggtgaaaggagattttaaaaatagaattgtatatatatatttgaaagatatgtaaattaaatttggtaatagattattcgtaattggatttattatatttgtaaatgattagttatttattagtagtattaatataaaagaataataattagtgtataatattatgttttagaaagttaaagtcggttaaaaggaaatttttttataaaattttttatatagaaataatttagtttttgataaatgaaatgttatgttttttttgtttgtatgttgggttaaaataaatatggtttggttttaaaagttcgatggtattttgtaatgttttggttttgagtttttaaaatataattttgtaattattgtttatttaagtaagtatatgtttgttattttaaagtattgtttaatatattgatattgttttgtttatttataatataagattttaaatagagtattttttttttatattttattattttagtatgtaaagtagtgttttttaaatttgtatataaaaaaaattgtagtgaatagtaagtaataataagaaaacggtgtaatgtagtgataggcgtttaaatttatagtttaaatattttttacgtgaatttaattttaattttgagatttttaagaaaattgagttattgaagtgtttaaatttttaagatggtgttgttttcggttttggtcggttattttttaagttttatttttttcgggggaacggtgttttaatttttttttaagataagtatttttggtaaacgttttttttttaagaaagaagtattttataaagtttttaattcgtcgcgtattttttgttttattgggttatagcggatttagtgtgacgttgtacgttttaaatcggggttggttttgtttcggaatttggaagattcggaaagttaaaaaataaataaaaaaatagtttttagggaggtacgttttaaaaatagtatattttgcgtttattttcgtgtttttaagagtgaggagaggagggaagaagaagggaggtaattgtttttgtgttgtgtttcgttgtttatttttttcggtcgtttcggggagcgtagcggtgcgttggggttggggttgagggttggcggtcgtcgtcgttaacggaatcgttattttcggacgcgttgggcgtgtttcgtttcgggtttttattttaggtagttgagatagggcgggtagatttgcggtaggttttttttgagtacggcggtttggtagtcgagttgcgggagttcgttgaggtcgagtgtagggtagagcgcgggggtcgtttcggcggcggcggtagaggcggaggtggagggtaggtcgtttcgcgggagtaggtagtcgttcgcgttcggcgttttgtagggcggcggcgcgaacgggttttgttggggcggcgcgtttttcgttttgtataggatgtattttagggtcgatttcgaggaggacgtagacgagattgaggtattggcgggtgcggtcgttatcgtcgttttttcgggtttggatggggtcgttcgcggcggtagcgggggcggtggttttaacgggaaattcgggaaggttgcggggttggtatcggttataaggtaggaacgcggggagcgcgcggaggttttcgcgttttttttttttttttttatttttagagcgggcggttggaagtcgttatagagagggtacgcgtcgtttttgggttcggcgtcgggcgggtacgcgtagtcggggaagtcgtttatagcgatcggggtggacgaggtatagggtgaatttcgcggcggggtaaaggcgttggtagtttcggtttcgtcgtcgtaattttcgttttttagtagttgtcgagtgcgggttgttaataaggcgtgattgagaggtaggataggtacgtggatgaaatttattatcgtggtggttagcggggacgtttcggacgatcggcgcgttttgttttattagggcgattttgggcgttgagaagcgggaattttttttggggattagggcgacgttttttgttgtcgtttcggcgggatagtcgcggttttttttttagtcgtcgcgttatttagagttcgaggtttgttttttagaagcggattcgtagatttttcggatttagagttatttttttttttaatttttatcgtagcggtttgcggagacggttttattggggtttcggattagtgagggtttttagaggtcgggagtagtagttgtcgggttggtgataggtttcggggtagtattttatgggtagttgtcgtttcggagttgtttttaattttgtattcggatcggtttatgagcggggataatattcgttgggtggcgggggtagtcggtggattttcgggaagttcggggttaaataggtattaagagttggtgatttcgtaggcgggagggttgggttggttttgttcgggatttgagggcgttaatagagtgtttaagatattgtttagtagttcgttgtttttttttgggggattagaattgttgtttttagtattttttgtagttttagttttggaatatgcgttttttacgttcgatagcgattgttggttttgcgttttttcgtcggaggggttttgtttttggtagggtcgagggaagagtagttcgtttagggagataggtatggtcgaaattttaggtaaggtgttcgaggtttggtttttcgggaacggatttgcggttgggcgatatagtagtggggattcgatttcgggggagggcgggtcgttcgttacgtggggagttcggggattttttgtttttagtttagttatgacgattggatttttttttttttttttttcgtttttagggaggagggaaaagggaaggaggagggggtttcgggaatataggggtagagggaggagaaagtgggtgttgaatgtggttggatcggagggatttttattttttgggtcgggggcgggggagggcggcgttggttagtttttgtttttggtttttattttgtcgttaggggaattgtggttgtcgtttgttttagcgagcggtaagtggggagcgtaagaaaaagtagtaattgttaggagatttcgttttttaattcggggagttttttaagagagttttttaatttttgttcgaggattggagacgtagagtatttataagttcggtatttgagtggttgcggttgcgacggtaatttagtgatacgcggtttttttatttttcgattttttttttggtattaaattcgtgtatgttgtgaagtttttagtttttcgttgagttttattgtttttttattaaaattttggggttagtcggatttttcggtatagtttatttttaggaagggtcggatttttgttggtttcgtattgcgggcgatagttattttcgaagattttagattttagtagtgcgggagtattagtcgtttcgggttgtagattttatttaaatgataagtgaagttagtttttattgagaatgttatttatacgtataaatataataaggtttatttcgattagtgatagttgtggattggttagatagttttttaataacgtttttttttttagggaggtttcgtttaaagtttttttttattttaattatcggtaggatttgaaattttggagttggtatttttattcgttattttgaatgttatttttaatagtaggttttttgggatggaattttataagtatattacgttttgttttgtaaattaagaattatgttttatttaattggaaaaatgaatagattttattagaagtagaatttttgttattattttaagattttagttttgtaaagatttaatatagaggaagatatttggttatattattttttaaaataataaatgtattaaggacgatattaaaataagaaatttttttttttatgagttttataaaagtgaatgtttttaagttttttttgttgcgattaatatgttttgttttttttgagtatttttagcgtgataaagaaatttgggagtgggagatggtaatatttttgtatttatgatggaagtttggatgttgtgtgttatatttcgatttgttttaaggaatgtgttttaatttttagtaaatagtattttaaggaaagttttttttagttttagtttatatagtgtgttatattataatatttttagtagagatgttgaatagtattttttattttaaatatttttagtttgaaaagtaattatttttgagtttataaaatggattttcgttaaatttatgaagttagtagaaaaagggaagaatattgtaatatatattttagatatatagttataaattgtatttgatttaagattattgggtattttaatattattttaaatatattttgtttaaaatagagtgaatgatttgtaaatttttttgtaggattttaaggtttagttgtgttaatgatttatagtttattttaattatgtataaagaatgtagaagattttagaaggtgggggagttattagaggtaaggagtttggatttttcgattatttggggaggggttatatgagtgagaaataaatttttattatgttaggttattaggatttggagttggttgttttagtaaatagtttattttgattaattttagatatgtggaagttaggtagatagaggaaaggtaaagagaattttgggaagtaggtatagaatgtttatcgggtattaaatggtaggatataatatggtaattgtaaggggattattatgaatagaataggagtaagtgtgggtatagaagtatatgagattagagaagtaaattaatttattaatattattattgttgtttttaggttttttttttttagtttattttaaaatagttattatgttttattgaggtgtaattttagtattatatagtttatttaaagtattagtttattgattttttatgtatttagagttgtgtaattattagtattattaattttgtaatatgagtatgattttaaaattttaatatttattagtagttattttatattttcgtttaaattttttagtagttattaatatgttttttgtatttgtgatttggttattttggattaaggtttatttatgttttatatgaattagtattttatttttttatttttttttattgataaataatattttattgtatggataaattatattttatttatttatttttattagttgttggatatttgggttgtttatattttttggttattatgaaaaattttgttaatgaatatttatgtataagtttttgtgtagcgtatattttttttttttttggatatatgtataggagtggaattgttggtttatatggtaattttaggtgtggtttttggagtaattgttagattatggtttaaatgattgtattttttatatttntattagtagtgaataagggttttagtttttttatatttttgataatattttttatttgttttttttgttatagttttttaagtgtgtgaagtggtattttattgatttatttatatttttttgatggttaatgttatatagtgtatagaatttgtaaaattaggatagtattgttaggtagttttgtaagttttttatttgtgttaattgtaattttttaatagttttataaaataggtattgttattttaattttatagttgggaaaattgaggtataaggttatttagtattataaagttaagtattgtaatttaaatttaagatattaaatgatagtttttttaggagtgtgattttaaatgttagatgttatataatttgatttttcggtcgttgttgtaaaattggtatttggttttattttaaatttgataaattatatttggtttgattttggttggttataataatttttttgttagaatgtttggggaggttgtttttaaaagattgaaaattttgaagtgggaaaataataataaagatgtttagtatgttttaaattattattattttataaattttgatgttgggtgattagtatttttggtataggaattttttaaatgtatgaatttttgaatgaataaaatttattgattaaatttaggtgtgatggggttaattttaaatatttttgaagattgtttttggagaagaggatttaaatgtggaagtattttttttatagtttggggaaaaaaattattttattaagatatagttgttatataataagttgtatatatttaaattgtataatttgttgttagatttgtgaaattaaaatgataaatatattttttgtttttaaaagtttttttatgttattttttaaatttttttatattgttttgttttattttttttttttagtattaattattattttttggtaagttattaatttgttttttgttattaaatattaggtttttaaaaatatttatatttgatttattaaatattaaattatatatttgtatatgttttttaggtttgtttgttttagatgttttattaatagattttatttttgggaaacgattttggatttatagaaaaattgagtagataatatagagaatgtttatatattatttgtataattttttttgttagtattttaaattaatagggtatatttgttataattaatgaattaatattgataaattgttattaattaatatttatagtttatttagattttttttatttttatttaatgtttttttttttttttaggattttatttaggatattatatttaattgttatgatgttttgtgttttttttggttgtgagagttttttagattttttttgtatttgatgattttgatagtttttaggagtattggtgaggtatattgtaagatgtttttttattgggatttgatgtatttttatgagtagattagggttttgggttttggcggggtggaaattaaagaggtaatgtattgtatttattatattatatgaagggtatatattgttaatatgatttatgattgttaatgttgttttttattatttggttgaagtagtgtttgttaggtttttttattgtatagttatttttttttttttttttgtatattttgtattttttggaaggaaattattatgagttatttaaggaagtgtgggggagtagggagttatgttagtttttttttggagtggagtatttatataatttatttggaattttgtgaggaagatttgtttttttttttttatttatttttttatttagttttttttttgtatggatttatgaatattttgttgtttaaatttttttagtttttggtattgggggtttttttagttgatttttgtgttttttgatttattttttgtattgtgtgtatgtgtgtgtatgtgtggatttttttattttttggtattataagatgttatagatttattagatttattttgtatattttttgttttagtcgtagaattagttatttatttaaggaagtttgagattttttatttgaaattggtatagaaatgaagatttgggtgttaaataaattaggttttattttttagaattgtatataatatagtgtattttttttttatttggttttttttatttagtataattattttgagatttagttaaattatagtatgtattaatagttaattttttttattttttttatttatatattatagtttgtttatttatttaattgtggataaatatttgagttgtttttaatttttttggtattataaatagagttattatgaaaatgttgtataagtttttgtatgaatatgtgtttttattttttttgggtaaatatttagtagtgaaatggttggataaattagtaggtgttgtgatatgagtgtttgtgttttttttaaatttgtgtgttaaaatttaattattaatgtgatagttttagtaggaggaggtgttggggagtgattaggttatggagt

SEQ ID NO: 41 - DNA, 5118 bp, Artificial Sequence
  chemically treated genomic DNA (Homo sapiens)
aagtgtaggatggtttgtttttgaaatatatttggtttaaatgtttattatgggagagagaaatagataggagttgaagaaaggagcggggttttgttgttttttgtttatggagtacgtagggcgggcggatgaaggtcggagttagtcgaggttgggattgagtattaagattggtttgggatggatttgatttttggttaatagaggagataaggggtcggttgggagtgtgatttagaaagaggtagaggagcgtgtgaagatggggttaaagtatttggaaggttggttggggaatgaggcgatagaaattattaataggggaggtggcgtttatagggatggtttattgtttttgagatggaggttttggggtttttggggtggatatagttgtggacgttttttggaagagttaggggtagtagtgataaagatataattagagggtttttaattagtattttttttaaaagatgttttttttttttttttagatttattttagttagtttatattttggtggtaaggtttttttttgtttttattatatagaattattaatttttaatattaggttttttaagttgtttgttcgggttaggggagtattgtagggagaggttgaaatagtgttttttttgggattttttggttgttttattgttttatttttattttcgttatttttatttaaatttagaggttttaatagatagttaaggtttagtagtttaggagttggagttggataatttgaggagtaagttaataaggttaattttgttatgtttatttttgttttttaggagaaggatatgattttttttatattttatttaaaaattaaaattaattttttggtgtaaagtttatgttttttttgaaattaggtggaatagtaagaagatttgtaggatagggatatggaattaggttattgtatattggtgaataaattgtgtatattatataaatttaaaagatattatttataggatagatgttgtagatagggatgtttgttatgatatttttttaatagatgatagtaaaggttgttgtagaaattttttagtagatgatagtaaaggttgttatggatagaatatttttttttaatttttttaaaaatatgggagggttagtagtagtttagtgatagtttgggttttttttttttaaggtttagatttagagttttattttattttttttaaagtttattttttttttagttttttttcgtgtgtttagatttgttatggtgggtttatttattttttttgggaagagataggatagatagggatttatgggatgagggtaatacgagataggtggggaatttttttttggagattaaagatatttttttttattattttatttttataagagttatttggttagaagggatatcgagttggatttttttataaggattgggaggttggttttggaggtcggcgaagagataaggaggttgtagtcgagagatttgtgttttttagtaagatttaaggtaagagattagagttttaatgaggttgagtttgtttttgattatttttttttttttttaattgttttttatgatttttgattttttatttttttgtaatttagtatttggtttgtggttgggtgtttttgggtttgtaggtcggatgggattggggtttttaggatagttaaaagagattagggattcgtttttttttgttattttttggagagaaaaatagtaatttttgggttttttttttttttttgttttagttttttttaggaatttattattttagtttaagtttttttagattttttatcgggttgagtgttttatattatgtagaggtagttaggttggggatgatagaaataattgttttgttttttgttgtagatttggggtataaggagggaggttatggggaagttgaaataagggtaagatgagaggtattaggtaaggaaagaggataaaatgtagataaaagagatgatgggatttgtgtttagattagaaatggtagatgtgttaaatagattaggataattaggtttggttaaaaattatttgttattgaattatttggggtagattttggattttagaaatatggaggttggatttaggaatgtgtatttttaaaaagttttttggttaattatgaagtatattgaaattggagatttattgattttagaaaaaggggttttagatttaaggatgaaaggttggaggtttaaagtttattattttagttattaagtgttttggtgtttggatatagaagggagttttacggagaaatgttatatttgaaagagtagtttttaaagtaaaaatatttttagttttttttgttttgtttttatacgtattgtaggtatattgggttgtaatttgtttagtatttttttaggttgggatggataggagtataggtatagatgaataaggttaagttagattttattgtgaggagggtgaaggaggtttggatttaatgcgggttaaaggttagggttaaaagttatttacgttattttttggagttttaggtaagtttagtagtttttagtgtttcgtgtattcgagttttacggttcgaaggggtaggtttaggggatttggagggggtagtattacggggaaaggttaaaagttaggggttaaagtttattttatatcggttatttcgttttatttttttttttttttttttattaagtcgttttgtttttattattttggagttatagtagttgtttggtagttcggaagtgcggtaagtagtcgttgcgaagtaagtttcgtttcggaacgggcggaagtagaggtaattttcggtatagtttcgtcgagagcgtgaattatcgttgcggaggggtagatttggatcggtggaaggtcgggcggaagtgcgcgtttggggtcgttttggttatcgcgtttttcgtttttcgttacgttatcgttgtgagttcgttattagcggttagcgcgggcgcggtcggagatcgtggggttttcggttgtcgttttttcgggtaaggttttttgttttttatttttcggtttttttttttatagtcgtttttttgttttttttttttgcgttgttttgcgggcgttacgttggttttatcgttttttttgtcgtttaaatttcgcggttgtttttattttagcgagggtaggggggtcgggtgttatcgttttttcgacggagtggatatttgtttttttttgaattatatggtatttaaaggtgttggtgtttgtgatttttggagataggagggaatgttggatgatttcgattagcgggagtttggatagtagtttggtttaagtaaggggtagggaaagttaaagataagagtaggtagatttgaaggggtggggttgggtatagtgtggacggcgtgtgaatttcgggtggtaatagtggagaaagatgttttgggttttgtttttgaattaggagttattatgttggtgatatttttcggattgagcgaggaagaggaggttttgtagaagaaatttaataagtttaagaaaaaggtgagggattgtgtgtggatatggtttaattttttatagattttgtattttgagaagatatggggtgagtgtgagcgaatggggaagtttttttggtttatatttagagatatattattttatagtgtagtttcgagaggtgggtttttttaagttttggtgtggattttttgttttttttatgtaatttgttatggattgttttttttttttatggtttttagtatcgtttaagagttgatgatttttaagtttgttttttttagttttatttagtgttatattgaaaaattttagatatttagtgttgaagttattatttttttatttttgattttttaaataagattgattatattaattttgttatatgtttggatttaaaattttgatttttttattatttgtatagttaaatttttgttaagttttattgtttttttttttgaagtaattttttttgtttattttttattgtgtattttttcgagtagggttttattgatatttatgtgggttattgtaatggttttttaataaattttttagtttttttttttgaatagatttttttatttttgtttaaatgatttattgaaaatataaaattttgttttttttgttttttaaaaattataaatggttttatattgtttataaaaaagttttaaaattttagtttggtagttttgtttagtaaagtagaattatttattatttttaaaagatgtatttttaaagtttttttatttttgtatttttgttattttgttttttttttttaaaatattttttttttttttgtgttgtgtagagatacgggagagggtttagtttaatagttattaaatattagaaaattttattagtttttagttatgaataatttgtattttttataattgtattgttaatttaatgtattttattttttagattgtaagttttttgagggtaggaataatgtattagttttttggatatttttgttacgaagttatggttgggttttatttaatatgtaggaaatagatggatgaagtttttaggaaaggtatataaatttatatttatttgtagtttatattttaggattttagtttatgattgagttatttgtttttaattttaaaaatgtaatattttggaaaatttttgggtttcgtggtttggttagattaggaatttttagtattatatatgatttaggggattagaggtaagaggtagagtatattagtgtattattttgagggtattaagaaagatggtttttggagtgatgtgtttaggggttttaggagaggaatcggttaggggttggtttttatttatttttttttttttatttttgtttttagaaaaaggtattgttggttttgaagaagtaaagtagtagtagtataattagttaaggtggtgttaaacgttgtgagtgataggggaaatggggatggattggaagtgggtagtatggagttgatttttattatggtttggttaatataatgttttttttttttgtttttttagt

SEQ ID NO: 42 - DNA, 5118 bp, Artificial Sequence
  chemically treated genomic DNA (Homo sapiens)
gttggagagataaggggaagaggtattatgttggttaagttatgatgaaggttagttttatgttgtttatttttagtttatttttattttttttgttatttatagcgtttgatattattttggttggttgtgttgttgttattttgtttttttagagttagtaatgtttttttttgggaataagggtgagaagagagaggtaagtgagggttagtttttagtcggttttttttttaaggtttttgggtatattattttagggattattttttttgatgtttttagagtggtatattgatgtgttttgttttttgtttttggttttttagattatgtatgatgttggaaatttttaatttaattaaattacggaatttagaggttttttagagtgttatatttttgaagttgaagataaataatttaattatggattagaattttaggatataagttgtaagtaagtataagtttatgtgttttttttggaagttttatttatttattttttgtatattgaatgaggtttagttatgatttcgtaatagggatatttaggaggttaatgtattgtttttatttttaagaagtttatagtttgagaaataaaatatattgagttagtaatataattataagaggtgtagattatttatagttgaaagttagtaagattttttgatgtttaatggttattaaattaggttttttttcgtatttttgtataatatagagaggagaagggtattttagaaaaagaaaatagggtggtaaagatgtagagataagaaggttttgggaatgtattttttggaagtagtgaatagttttattttattagataaggttgttaaattaaggttttgaggtttttttatagataatgtgaagttatttatggtttttgagaaatagagggagtagaattttgtgtttttaatggattatttgaataggagtgaagaagtttgtttaaaaaaaaagattgagaaatttgttgagagattattataatggtttatatgaatgttaataaagttttgttcgggggaatgtatagtgaagaataaataggaaaaattattttaaaagaagaaataataagatttggtaaaggtttgattatgtaaatagtggggaagttagagttttgagtttaaatatgtggtagaattggtgtagttaattttatttggaagattaagaatagaaagatgatagttttaatattgagtatttgaagttttttagtataatattggatagaattggaaaaaataaatttggggattattagtttttaagcggtattaaaagttatgggaaaggaagataatttatggtaaattgtatagaaaagatagaaggtttatattaaggtttgggaaagtttatttttcgaagttatattgtgaggtgatatgtttttaggtatgggttagaaaaatttttttattcgtttatatttattttatatttttttagagtgtagagtttgtgaaaggttaggttatgtttatatatagttttttattttttttttgagtttgttgaattttttttgtagagttttttttttttcgtttagttcggggggtattattaatatggtggtttttagtttaggggtagggtttaagatatttttttttattgttattattcggggtttatacgtcgtttatattgtatttaattttatttttttaggtttgtttatttttgtttttggttttttttattttttgtttaaattaggttgttgtttaagttttcgttggtcgggattatttagtatttttttttgtttttagggattatagatattagtatttttaggtattatgtggtttaaggagggataaatatttatttcgtcggaaagacgatggtattcgatttttttattttcgttagggtaaggataatcgcggggtttgaacggtagagaaggcggtggagttagcgtagcgttcgtagagtaacgtaaagaggaagaatagagaaacggttatgagaaaaagggtcgaagagtgagaagtagagggttttattcgagggggcggtaatcgggggttttacggttttcggtcgcgttcgcgttggtcgttgatagcgggtttataacgatgacgtagcgaggagcggaaaacgcggtaattaaggcggttttaggcgcgtattttcgttcggttttttatcggtttaggtttgttttttcgtagcgatagtttacgttttcggcggggttgtatcggaagttgtttttattttcgttcgtttcggggcggggtttatttcgtagcgattatttgtcgtattttcgggttgttaggtagttgttgtggttttaggatgatggagatagagcgatttggtgagggggaggggagggaaatggaacggagtagtcgatatggaatgaattttgatttttgatttttgattttttttcgtagtgttattttttttagattttttggatttattttttcgggtcgtggagttcggatgtacggggtattgggagttgttgaatttgtttggagttttagagagtagcgtgagtgatttttgattttaatttttgattcgtattgagtttaaattttttttattttttttatagtaggatttagtttaattttgtttatttgtgtttgtatttttgtttattttagtttgaaggggtgttggatagattatagtttagtgtatttgtagtacgtgtgaggatagagtagaaagggttggggatatttttgttttgagagttgtttttttaaatgtggtattttttcgtggagtttttttttgtatttaagtattagggtatttggtgattgagatgataggttttgagtttttaattttttatttttaggtttgggatttttttttttaaaattagtgagtttttaattttagtgtgttttatgattagttagggagttttttaaaaatgtatatttttaggtttagtttttatgtttttgaaatttaaaatttgttttaggtaatttagtagtaggtagtttttggttaagtttgattgttttagtttgtttgatatatttgttatttttgatttgaatataagttttattattttttttgtttgtattttattttttttttttatttaatgttttttattttgtttttgttttagtttttttatggtttttttttttgtgttttagatttgtagtaagaagtagaatagttgtttttgttatttttagtttggttgtttttgtatggtgtggagtatttagttcggtgaggagtttggaggggtttagattagggtgatgggtttttgaaggaagttgggatagaggaagaaagaagatttaaaagttattatttttttttttagaaaatggtagaggaagacggatttttggttttttttggttgttttgggagttttagttttattcgatttataggtttaaagatatttaattataggttagatattgggttataaagaggtaggaggttaggggttatgagaaatagttggggagaaggggaggtggttagagataagtttagttttattggggttttgattttttgttttaggttttgttggagaatataaatttttcggttataatttttttgttttttcgtcggtttttagggttagttttttagtttttatggggaaatttaattcggtattttttttggttaggtgatttttgtggagatgggatggtagaagagggtgtttttaatttttagggaagggttttttatttatttcgtattatttttattttatgaatttttgtttgttttgtttttttttaggggggatggatgaatttattataatagatttgaatatacgggaggaggttgaggaggagatagattttgagaaaggtaaggtggggttttgagtttgagttttgaggaggaagagtttaggttattattgggttattgttagtttttttatgtttttgagaaaattagaaaaagatattttgtttataataatttttattgttatttgttgggaaatttttataataatttttattgttatttgttgggaaagtgttatagtaaatatttttatttatagtatttgttttgtaaatggtattttttaggtttatataatgtatataatttgtttattagtgtgtagtgatttgattttatgtttttattttatagatttttttattattttatttggttttaagaaaggtatggattttgtattaaaaggttagttttagtttttgagtggggtgtaggagaagttatgttttttttttaaggaatagagatggatatgataaggttgattttgttggtttgttttttagattgtttaattttagtttttggattattaagttttagttgtttgttggagtttttggatttgggtgggggtgacgaggatgagaatgaggtagtgggatagttaggaggttttagaggggatattgttttagtttttttttgtagtgtttttttggttcgagtaagtagtttggaagatttagtgttgaaggttggtggttttgtgtagtggaggtaagaaagagttttgttattaggatgtgggttggttaggatgggtttgaggggaagaaagggatattttttgggaggagtgttaattgagagttttttggttgtatttttattattgttatttttgatttttttaggaagcgtttatagttgtatttattttagaggttttagagtttttattttaggagtagtgggttatttttgtggacgttattttttttgttggtgatttttatcgttttattttttagttagttttttaggtattttggttttatttttatacgtttttttatttttttttgggttatatttttagtcgattttttgttttttttattggttagaggttagatttattttaggttagttttggtatttagttttagtttcggttggtttcggtttttattcgttcgttttgcgtgttttatgagtaggaggtagtaaggtttcgtttttttttttagtttttgtttattttttttttttatagtgggtatttgagttagatgtgttttagaaataggttattttgtattt

SEQ ID NO: 43 - DNA, 6074 bp, Artificial Sequence
  chemically treated genomic DNA (Homo sapiens)
ttttagttttttatagttttttgatttttttttttttgattttttatatttttttttttttattttttttttgtttttgttaattattattattttatttttattaatattattaagtgtatttgtttgagtatttttgggtgtttgatttaggatttttttaggggtatttttgttggggtaatttttttagtttttagaagggtatggttgtgtggttgagattgttgaggaaagtagtaaagataggaggatagaattgaatgtaaagttattttgtttttaagtacgtttaatggaatggttttatagtagttgcgtttaattttgtgggtattgttattgtattttgtcgtttaggaagtttataaattatataatgttttttacgtggtagttatttggtggttttgagttttagagattttgatttagtattttgattaggatatggagttgtttggattattagtggaatattaatttttatattttaatattgggttttagagttattttgtgaaattttttttggaaaggaaagatttgagttttaattttaattttaatgtgtattttaaacgtaggtttgagagttgggggatggtagatgttaagtagaaggttagattaatttttggataatattggtaacgaaaattacgtaggtagttgagaataaagtaaatgttttttatttttttttatttcgtttattatgttggtgatgaaaattgtaaaaatgagtttagtataaggttttttatttttttttttggtaagagataaggaatatattaatagttaaggttttagagggagttgatatttagataatagatttttttttttaaattttttaatatattaaaatttttttattttttttaaatatagttttttagagtttttaataaaattttttttttttttttttatatatagatgatattttttttttgttttttttttgtattaggtgttttattttgttttttttttgagtttggttgtttgttgttgttatttaggaaggttttgtagttatttgaattagtttagttattgttttttggggtttgattgtgggaattgtaatttttttaatgttgggtttatggttgtgtttttttttaaagaatgtttgggttgtttaatttttagtattttgggtaattgttgatttaaaatagtaagtttagttggtttgaattatttagggaaggttttggtgtttatagttttataattatttttataaatgaattaggaaggaaggggaggttgattatagtgaagaagagggttttttaaatatattttttataataagtatgtaggagaaaggaaagggaaaattgatagggcggtttatcggtttttagtagagtataatatagtttttttgtttgtatagggaggagaggttgtgattggttttttatagaagagattatattgagtttaaggttagttgtagtaagtgtgtgtaaaggtagtttaggtagatttttagtgggaaggttatataattattaggttttacgtgtagagaaataggagttgtagtggttacgcgagatagatgtagtgtttgtaggtgaaggcgtatatttgagtttttatatagttttaaggggttatagttggaattttattcggtttagagagtgaggtgttttaatataaaatgttatattattttttaggaaaaatgattgttttgttttaaatcgcgttttgttaattttttttttattttttttatattatagttgagaaataattttatattttttgatttatttatgaaaatattttttataggaagaggtatgtacgtgtatgtatatgtatatgtttaagtaaagaagttgatatgaaaatgataatataaagatagtggtaaggaattaagataagggaaaggtgtgtttattgagggagtttttttttaaataataggtagttttgttgatgttaaatattatgttaagtatgtaaataaatttttgtatttagtatttatattaatttaatgagttaagtattatttttattgaaaatgtggaaatcgaggtagtatagtagagaagttagtatataagttttagaattagtttgttttgtttttaaaattaagttttgttttttattggttgtgtaattttgggtaagttattaaatttatttagttttgattttttttttataaaaggggatgggatttattttataagattattgtgaggattaaatgagatatataaaatataaaagatagagtattaataatttaggatattaggttttttttatgattaaacgtttaaaaattattttaatttagtttattaaaaaaatgatttttaagttaaaaaaaaaaaaaaaaatatttagtttttgatgatttgtttgatttgaatgaattggagggttataaaattatagatatggattagtttttgaaaattttggagggagaattaatgatttttaagtattagaatgtattttgatttggatattttttagtttgtaagatggtaagttatttttttttttttttttttttttttttttttttttttgagacggagtttcgttttgtcgtttaggttggagtgtagtggcgggatttcggtttattgtaagtttcgtttttcgggtttacgttatttttttgttttagttttttaagtagttgggattataggcgttcgttattacgttcggttaattttttttgtatttttagtagagacggggttttatcgttttagtcgggatggtttcgattttttgatttcgtgattcgttcgtttcggttttttaaagtgttgggattataggcgtgagttatcgcgttcggttattttttttttttttttttttttttttttgagatagagttttgttttgttatttaggttggagtgtagtggtataattttggtttattgtaatttttgttttttaggtttaagtgattttcgtgttttagttttttaagtagttgggattatagacgtacgttattatgtttggttaattttttgtatgtttagtagaaatggggggttttattatgttgtttaggttggtttcgaatttttgagtttaagtaatttatttattttagttttttaaagtgatggtattataggtgtgagttattatgtttggtttgtaagttattttttgatttaaaatattttttaattatgaaggaaattgatttgattttgttatttttttttatttttgattttgggggtaggggatagataagtagaaattgttgaatatgatttttagtcggttgggtagttattttttagttatagtgagtttgatttgcgtgttttagtaggaagtaaggagttaggtttttttttagttttggggaataggagaagggtgggggaatttttgatttttttttttttgtagttaaagtagattagtttagggaggagatagggaaattattagagtaggttaagattaatttgaaggaagtgggagttagggataatttattaaaggaagtgtatgtgtgttttgtatatgtatggggtggattaaggaaaagatttattttaaaagaataaagtatgtttcgataaatttattgaaaggaatgatttatattggtgttttttgtttaaatgttgagattaatggtttggtgttttttttttgaaattaggttgttttatttatatgaaataaattgggtagaggttaatcgtgagagtttgagtttttttaagtaaatagtaaaagattttttaggtttaatagtttttatttttatttttaaggaaagtggatttattcggagtacgtaggttagaggaggtaggagaagagggttagttcgtgagtttcgggtatttggagaatatgaatttttcgggtgtattgtttttatgagggttatcgaggaatttatggattttttatttttcgtttagaatgttttttttttattttttttatttttttaaattttagtattaggggttattttagagttataaattttgaaaggattatttaggtgattcgggtttatatatttttttttcggggtatatttggtggtaggttagtaggtttttggttttagttggtggtgttatataattagattcgttatagagatttattttttattagttttaggttagaagtacgaagattgattttaacgatgtggtttgtttgggaggtaaggcggtaggcgttgttagaattgatgggaattgtggtataggtgggaaatttggtttaataaattttttattgatttaggggattattttttttgagttaagttttggtaagcggtcggcgaaatttataggttttttttttggttgcgtttttagtttttagtttttttcgttttagagatgttttaggagcggtttttcggtgtaggtaacgggtgttcgggcggtttcgtttcgtcgtttagagtttggaagtcgttattgcggtttaggataattcggttacgcggtcggcgtcgatttcgtacgttggagttcgttgtcgtacggcgttggtagtcgggggtggtgtttgaagttaggcgttttttgttttttcgtcggttcgggtgttcggttcgcgtcgttaggttttgggattttaggtcgtttcgtttagtagttcgcgttttgttcggtgcgtttagcgttttcgttttttattttaaatttttattttttgtgtttttaggggggtatttttatcggggcgggaggggggggttagttgtgtttcggtcgtcgagtggcgaggaggtgacggtagtcgtttttttattttcgttcggcgggtagcgttgcggggcgagtgttagtagagaggcgttcggtttttttttcgttttttcgcgtcgggggtaggttttgtttagtttgcgtttttttttttcgtatcgcggcgtcgtttcgttattcgggtatcgtaggtagggtaggaggttggagagtttgttgttcgttcgttcgtaaaatggttttttcggttggatagttcgttttgttcgttttgggtacgtacgtcggttgcggcgttttttgcgtcgcgcgatattttgtttttttcggttttcgtcgagttttttttttcgggggtttttgcgttcgtttgggagagtggagagaagcgagtagttttaatgggttggcgtttgggaggtaaggggagttattaagaatgataaagaggggattgttcggtcgagcgtcgaggttttttcgggaaagtggttgtttgggtcgtgcgtgagaatatttgggaaggggaagcggagtgtgaacgggtttgaattttaattcgtcgtagttgtgtgtttgtttagatatatgtttatatttatttgtttatttggttgtttttaagttcggtttagtcggcgtcgttggcgtgtagattgggtcgtttcggaacgggggtcggcgtttaattttttggtcgggttttgtttgcgtttttttggtattttttgtttatttttaagttttagcgacgagtagagatgtttaagatcggtagaggcgttttcgatttttttttagagtttttgagttttgggggtaggttttggatttttgggcggattaatggtttttttaattaatttttttgggagaagtggtttcggtgttcgtcgagggtaggagcgaaattttagatcgagtgttgttagttttttttgagtatgtttttggaaatgaaggagggatgggaaaggtgaggggaagttaaatttttttttcgggtcgggtttgcggagcggtgcgttttttggcggtgaagtttaagggtttgtttggacgcggtgagggcgtagcgtcgcgcgttttttggttaatttttgttttttgtgttggtgggtttttttggtgttgagatagttgattaatagcgtaggtgttttggttattgttagtttttcgtgaagtgaattgttcgttcgatatgtttcgagtttaattcgtatagtatgcggttcgttgtagggtggttagagtttgtggaaagttatggaattt

SEQ ID NO: 44 - DNA, 6074 bp, Artificial Sequence
  chemically treated genomic DNA (Homo sapiens)
gagttttatggttttttatagattttaattattttgtagcgagtcgtatgttatacgggttaaattcggggtatatcgaacgaataatttattttacggaagattagtaataattaggatatttgcgttattgattagttattttaatattagagagatttattagtataaggggtaagaattggttaggaggcgcgcggcgttgcgtttttatcgcgtttagatagatttttgaattttatcgttaaaaaacgtatcgtttcgtagattcgattcgggagaggggtttaatttttttttattttttttattttttttttatttttaaggatatatttaaaggaaattggtaatattcggtttagggtttcgtttttgttttcggcggatatcgaaattattttttttagggaagttaattaaaggaattattaattcgtttaaaaatttaaaatttatttttaaagtttaagagttttgaaaagagatcgagggcgtttttgtcgattttgaatatttttgttcgtcgttggggtttagaggtgggtagggggtgttaaaggggcgtaggtaagattcggttagagggttagacgtcggttttcgtttcgaggcggtttagtttatacgttagcgacgtcggttgagtcgggtttggaggtagttaggtaagtaggtaggtgtaggtatgtgtttgagtagatatatagttgcggcggattaaagtttaagttcgtttatatttcgttttttttttttaggtgtttttacgtacggtttaggtagttattttttcggggaagtttcggcgttcgatcggatagttttttttttgttatttttaatgattttttttgttttttaggcgttaatttattgagattattcgtttttttttatttttttaggcgggcgtagaaattttcggaaaggggaattcggcggggatcgggggaagtagggtgtcgcgcggcgtagggggcgtcgtagtcggcgtacgtatttagagcgaatagggcgagttgtttagtcgaggggattattttacgggcgggcgggtagtaggttttttagttttttgttttatttgcggtgttcgagtggcggagcggcgtcgcggtgcgggggaaaaagacgtagattaggtagggtttgttttcggcgcgggagggcggagggaggatcgagcgtttttttgttggtattcgtttcgtagcgttgttcgtcgggcggaaataggaaggcggttatcgttattttttcgttattcggcgatcggggtatagttgatttttttttttcgtttcgatgggggtgtttttttgagggtatagagggtgggggtttggggtaaggggcggggacgttgagcgtatcgagtagggcgcgggttgttgggcggggcgatttgggattttagagtttggcggcgcgagtcgggtattcgggtcgacgaaaaggtaggaagcgtttgattttagatattattttcgattgttagcgtcgtgcggtagcggattttagcgtgcggggtcggcgtcggtcgcgtagtcggattgttttgggtcgtagtggcggtttttaggttttaggcggcggagcggagtcgttcgggtattcgttatttatatcgaggggtcgtttttggggtatttttggggcggggaaggttggaggttggggacgtagttaggaaagggatttgtgagtttcgtcggtcgtttgttaagatttggtttaaggaaagtggttttttgaattaatgaagaatttgttaaattaggttttttatttgtgttatagtttttattaattttggtaacgtttgtcgttttattttttaggtaggttatatcgttaagattagttttcgtatttttggtttgggattgataaaaaatgggtttttgtgacgaatttggttatatggtattattagttgaggttaaaagtttgttagtttgttattaagtgtatttcgaaagaggggtgtgtgggttcgagttatttgggtggtttttttaggatttgtggttttgaggtggtttttggtgttggaatttggggaggtggaggggatagagggaagatattttgggcgaagagtggaagatttataggtttttcggtgatttttatggggatagtatattcgggagatttatgttttttaggtattcggagtttacggattgattttttttttttgttttttttggtttacgtgtttcgggtagatttattttttttgaaggtgggggtgggggttgttgggtttggggaattttttgttgtttatttggggaggtttaggtttttacggttgatttttgtttagtttgttttatgtaagtagagtaatttagttttaagaaggaagtattaggttattggttttaatatttgggtaggaagtattagtgtaaattattttttttaatagatttgtcggagtatattttgtttttttagggtaaattttttttttggtttattttatgtatgtataaggtatatatgtattttttttagtaggttgtttttgatttttattttttttaggttgattttgatttgttttggtggtttttttgttttttttttaaattagtttgttttggttatagaaggggaggaattaggggtttttttattttttttttgttttttaggattagagaaggatttgattttttgttttttattggaatacgtaaattaagtttattgtggttgagggatggttgtttagtcggttgagggttatgtttagtagtttttgtttatttgttttttatttttaaagttagaggtggagggaagtagtagaattaagttaattttttttatgattggaaaatattttaaattaagaggtaatttgtaggttaggtatggtggtttatatttgtaatattattattttgggaggttgaggtgggtggattgtttgagtttaggagttcgagattagtttgggtaatatggtaaaattttttatttttattaaatatataaaaaattagttagatatggtggcgtgcgtttgtagttttagttatttgggaggttgaggtacgagaattatttgaatttgggaggtagaggttgtagtgagttaagattgtgttattgtattttagtttggatgatagaataagattttgttttaaaaaaaaaaaaaaaagaaaaaaagagatggtcgggcgcggtggtttacgtttgtaattttagtattttgggaggtcgaggcgggcggattacgaggttaggagatcgagattatttcggttaaaacggtgaaatttcgtttttattaaaaatataaaaaaaattagtcgggcgtagtggcgggcgtttgtagttttagttatttgggaggttgaggtaggagaatggcgtgaattcgggaggcggagtttgtagtgagtcgagatttcgttattgtattttagtttgggcgatagagcgagatttcgttttaaaaaaaaaaaaaaaaaaaaaaaaagaaaaaaagagataatttgttattttataaattaaagagtatttaaattaaagtatattttaatgtttgaaaattattaattttttttttaagatttttaaaagttggtttatatttgtggttttataattttttaatttatttaagttaaataggttattaggggttgggtgtttttttttttttttttaatttaaagattatttttttggtaaattgaattgaaatgatttttaaacgtttagttatagaggaaatttaatattttaaattgttgatgttttattttttgtattttatatattttatttaatttttataataattttatgagatagattttatttttttttataagagaagaattaagattgagtgaatttagtaatttatttagaattatatagttaataaagggtagagtttgattttgaaagtagaataagttggttttgaggtttatgtgttggtttttttgttatattgtttcggtttttatatttttaataaggataatgtttaatttattgggttgatgtgagtattaaatgtaagaatttatttgtatatttagtataatatttgatattaataaaattatttattatttaaaggaaaatttttttagtggatatattttttttttgttttagttttttattattatttttatgttattatttttatattagtttttttgtttgagtatatgtatgtatatgtacgtgtatatttttttttatgggaaatatttttataggtgaattaggaggtatgaagttgttttttagttgtggtgtgaaagaaataagaaaaaaattgatagaacgcgatttagagtaaagtaattattttttttaaagggtggtgtgatattttgtattggaatattttattttttgagtcgagtgaaattttaattgtagttttttgaagttgtgtggagatttaggtatgcgtttttatttatagatattgtatttgtttcgcgtggttattgtagtttttgtttttttgtacgtggagtttgatgattatgtggtttttttattaagagtttgtttggattgtttttgtatatatttgttgtagttggttttgagtttagtataattttttttgtgagaagttaattatagttttttttttttgtgtaaataagagaattatgttatgttttattgagagtcggtaaatcgttttgttagttttttttttttttttttttatatgtttattatagagggtatgtttaaagagtttttttttttattgtgattagttttttttttttttttgatttatttgtggaagtgattgtggagttatgagtattagagttttttttgaataatttaggttagttgagtttgttgttttagattagtagttatttaagatattggggattgaatagtttagatattttttgggaggaagtatagttatgggtttagtattgaaggaattataatttttatagttaagttttagggagtagtaattgggttggtttaggtggttgtaggatttttttgggtgatagtagtagatagttaggtttagagggaaaataggatggggtatttggtgtagagggagggtaaaggagagatgttatttgtgtatgagaaagaaagagggaagttttattaaggattttggagaattgtgtttagggagagtgaggagattttaatgtgttaagggatttagaaaaagaaatttattgtttaaatattagttttttttggggttttagttattagtgtgttttttattttttgttaaaggaaaaagtaggaaattttatgttgggtttatttttatagtttttattattagtataatgggcgaggtaagaagagataagaggtatttgttttgtttttagttatttgcgtgattttcgttgttagtgttgtttaaagattggtttgattttttgtttaatatttgttattttttagtttttaggtttacgtttggaatgtatattgaagttgaaattgaagtttaaattttttttttttagaggagattttatagaatggttttaaagtttagtattgaagtgtggaggttggtgttttattagtggtttaagtagttttatgttttagttaaggtgttaggttagagtttttgggatttagggttattaggtggttattacgtgaaagatattatatagtttgtgaattttttagacgataggatgtagtagtagtatttataggattgagcgtagttgttgtgaagttattttattaagcgtgtttggaggtaggatagttttgtatttaattttgtttttttatttttgttattttttttagtagttttaattatatagttatatttttttggagattggaaagattgttttagtaggagtgtttttgggaaagttttaaattaagtatttagaaatatttaggtaagtatatttaatgatgttgatggaaatagggtagtgatgattaatagaagtaaaagagagataggagaaagaaaatatgaagaattaaggaaggagaaattaaagaattatagagagttgaaa

SEQ ID NO: 45 - DNA, 5969 bp, Artificial Sequence
  chemically treated genomic DNA (Homo sapiens)
ttaaggaggaaggatttataattgatttcgttgttttttattagtgttaaaatagattagtttagtgatgtttaagtggatacgatttagaagcgagacgtaaagaggttaaatacgggtaaatcgtacgtaaaattttgatattattgtaatacgttcgtggggtgggggtggtaagagtgttttagtatcgtagtttcggcgtagatcggaatttcgtagttattttggtggtttcgtggtgggaaagacgcgttttagcgaatcggtcgcgttattttcggagtacgttgggaattacggtaggttagggcgtaaagagagtagtcgggcggttttttggtgttatttgttggtttttcgtgtgtggtaagtattgtcgttttttcgttgattatttgttgggttattgtcgagaattacggttggggtgagaattgtggtttggcgttattttttagtgagggttattttggtgttcggaaagggcgttgggttattagtatattgttacgagtgggagtaggagttttgtagtcggatatcgtggattttgtttttgtttttttcgttttggttgtgtggttttttataggttatttaatttttttggggttaagttgttttatttgtgaagtggggattatagtatttatgttatgagagcgtttgaggagatgataggatgtatgagaaatgttttgttttttaaataaatgttggttttattattgttcgtttttttttgtttttttgttttttgatgttgtttttgtttgttttgtttttttgagataggattttattttgttgtttaagttggaatgtaatggtatgattatagtttattgtagttttgaatttttgggttagagcgattttttcgttttagtttttggagtagttgggattataggtatattttattttattttaaataatttttttattatttttagtagagatagggttttgttatgttgtttaggttggttttaagtttttgggtttaagtgatttttttatttgggttttttaaattgttgggattataggcgtgagttattacgatcggtttttaatttttatttattttgtttttttttaatggaacgaaagttttatgagattagaggttttgttttgatagattttaataaatgtataatattgtatgattattattataattaagatttaagatagtttcgtttttttataaaattgttttagttttttaattaatttcgtttattatttagtattagtaattattgatttgttttttttttttatagttttgttttttttagaattttatatatagggaattgtcgtggtttgaatatttgtttttttaaaattcgcgttgaaatttaatttttagtgtggtagtattgagaggtggggttttgaagaggcgattgggatatgagagttttgttataatgtttttataaatgaattaatagattaatgggtttaggggttaatgggttaatgggttatcgtgggagtgggattggtgtttttataaaaggaagaagagagatttgagttagtatattgaggtttttcgcgatgtgatgttttatacggttttaggatttaatagagtttttattagtaagagggtttttattagatgtagttttttaatttcggattttttagtttttatgagaaatgtttttgtgggattttttttatttaagtatattgtttttaagatttatttatgcgtttttttattttttcgtttttttttgtgagataaggtttggttttattgtttaagttggagtgtagttgtatgatttcggtttattgtaatttttattttttaggttttatttttattttagttttttaagtagttgggattataggtatgtattattatattcggttaatttttgtattttttgtagagatgggtttttgttatgttgtttaggttggtttttatagtttttagttggtgagttgaagaaattcgtttgttttggttttttaaagtgttggaattgtagttatgagtcgttgtgtttagtcgtatatgtatatttgtattatttatttgtttttttttattattggtatagaagggatgttttataggagtaggttttatatagggttgtttttttgattttaggttattatgagtaaaattattataaatatttatatataagttttgtgaatatagttttttattttttttgggtaaataatgtttaggtgtgggagtgttgggttatagtggttttaagggtaaatgatttttagttttgagttttttttttttagattttagttttttgttttaggtattgggatatattagtaataagaagtagtaagtttttttttttatttaggttatatttcggggatggagatagaaatatataaggaaagaataaataatatgttgtttttaaagaaattgtgtaaaaagaaaaaataaataagatgtttttgtatagtatagtagttatagagtaatgggttagaaagtggggtaggaggagaagttttttttagggaaagattttgagttgagatttgaggttttttaggtaaggggacggtgaatgtaagggtgtgtaggttatagggggataagttgggtgtgtttagtaattgtgttgggagttggatttagtagtgggggtttttattagagaggaggtagtattgagatttgggtaggaagttggggtttattttaagtttttttgaaaattaaagaagggttttaatttaaggattgtttttttttttttttttttttttttgtttgtagatagggttttgttttgttatttaggttggagtgtagtggtataattttagtttattgtaattttcgtttttcgggtttaagtgatttttttgttttagttttttgagtagttgggattgtaaatgtatgttattacgtttggttaatttttgtatttttagtagagacggggttttattatgtttgttaggttggtttcgaatttttgtgtttaagcgatacgtttttttttggttttttaaagtgttgggattataggcgtgagttatcgagttgggttaggttttaggtattgttatgatgtaaaaatttttttttagaaaagagaatattagttttttagttggttttttgtagttaggagatgtaagagtagtagttgaatttgaggtttgttttggagaaagaattaaaagtagatatggatggtttggatgtgagggagggaaagagaattttaagtgtattagtagtggtgggaggaggttcggtatagtggtgttatttggaagataaatcgttggtgtttaatttttatgattcgaaagttttttataagtttgatatattaggtaaaatgtttgattgtattaagttttagtttatcgttataaaataggttatgaaaattgcgtgagaaaatgtatataatagtttaataaataatattggttgggtgtggtggtttatgtttgtaattttagtattttgggaggttaaggtgggtagatcgtttgaggttaggagttcgagattagattggttaatatggtgagattttttatttttattaaaaaaatataaaatatatttgggtaaatatggtgaaattttatttttattaaaaatagaaaaattagttaggcgtggtggcgcgcgtttataattttagttgaggtacgagaatcgtttgaattcgggaggcggaggttgtagtgggttgagattatattattgtattttagtttgggcgatagagtaagattttgttttaaaaataaaatatatatataaaatataatagtatttgtttgtttgtttgtttttgagatgtttcggattatagtgcggggattatagacgtgagttattaagttcggataatattattatattgtttattgtatttttataatatttttaaggggtaggaatttttttttttagtttttttttttcgattttatcgagagatagggtttcgttttgtcgtttaggtttggagtgtattggcgcgattaaagtttattatagtttagattttttggttttaagcgattttttagtttgggttttttaaagcgttaggattataggcgtgggttatcgcgtttgattagttttttttttttgtagttgagttttaagagtttgtttaaagagtagaggtgggttgaaggtataaagcgaatgaaagaataggttttcgggtatcgttgtacgttttatttttttttaggggcgttgtattttagtttttttcgtatatgcgtattgggttttttatcgtttttcgtttttagtaaagtttttcgttcggagtatgcgcgggtcgtttggcgttaattgttgatcgttatagttatagttagggttagtttcgtcggttttcgggtggcgcgcgttcgttgtttttttagttttaggatgatcggttagaagacgttttattttttttttttttttagtttcgttaggaagcgatacgtttttagtttcgagtcggtcgtttaggggatcggcgtggttggggtgtttgaggaaagcggagatgcggcggtgaggcgcggtttgggtcggggttagggggtgaagggggaggaaggcggtgggtttcgtttgacggagggcgtgtaggatcgcgtttttgattcggtaaattcgggtttcgttttttaaatagtttttacgtgtttaaaatagtcgtcgttgttttttatgggtcgttatgttaaagggttagttaatgggaacgcgtttcggggtttatggcgttaattcgcgcgtcgtaggtttttttggttcggtgcgttgtttaattagaggggagagggggcgggatttagagggaggttttttgtcgcgaaaagattacgtggggacgcggtggggcgggtttggcgggggcggggtatttttgtgtagggtttttagttatcgcgacgtttttcgggaagttatagggcgttttttagttcgttttttcgttttagtttagaatttaatttttaattttcggatcgggtttagttttgggtttttattgttcgtttttgttgggatttgttttataaatgggcgttttttgttttgggtcgtgggggttgggtcggaagttgcggacgtttgggaaggggtcgttgtagtttttgagtcgtttttgcggggattatttgtaggttattttagttaagaaggtttcggttgggtaggaggagtttgggacgtcgtttttttcgtcgttgagtgtcgagtagttggatcggatttagaggaataaggtcgcggttttgtttagattcgcggttcgtaacgtgttcgtgggttttggagagagttggaagaagtattttagcggggagttcgggaaatcgtattttattaaggtaaatatggaaatgtattttttataagggtaaatgtggaggttgtcggtttttttgttttgttagtgtagtcggttaagtttatgttttcgtaggtttaggttgtattttttttaattttttttatttataaagggggtaaaagaaagttatgatgttttattttgtagttttatattggttaaagttgttaacgattcgcgagatgatattatggatttatttaagttatatagtttattgtttaggaaaggttggcgtagtaaaattattaattattttgaatgaaatttggtttgagttttaaaaagtcgagaggagtggtattgttaggatttagtttagagaaagaggtaaggaattgatttgattgaattatttaggtgggggggtaggtattgtttttgtttgttgttttttaaaagaatttggatataatatgataaagaattaatgatgttttaaataatttgtattagaagtttttttattgaatttttatggtttttaatgagaatttgattttaagtttagtttatttttaaattagt

SEQ ID NO: 46 - DNA, 5969 bp, Artificial Sequence
  chemically treated genomic DNA (Homo sapiens)
gttgatttaaagataaattagatttaaaattagatttttattggaaattataagaatttaataagaaagtttttagtgtaagttatttggaatattattagttttttgttatgttatgtttaaatttttttaaaaaataataaataaaaatagtgtttgtttttttatttaagtggtttaattaggttaattttttgtttttttttttgggttgggttttgatagtgttatttttttcggttttttaaagtttaagttaggttttatttaggatggttggtgattttattacgttagttttttttggataatagattatgtgatttaaatgaatttatgatattatttcgcgggtcgttaataattttaattaatataaagttgtagagtgaaatattatggtttttttttattttttttgtgagtaaaggaggttgaagggggtataatttaagtttacggaaatatgaatttggtcggttatattaataagataaaagggtcggtagtttttatatttatttttatggaaggtgtatttttatatttattttgataaaatacggtttttcgaatttttcgttgaggtgttttttttagttttttttaaagtttacgggtacgttgcgggtcgcgagtttgagtagggtcgcggttttgtttttttggattcggtttaattgttcggtatttagcggcgaggagggcggcgttttaggttttttttgtttagtcggggtttttttggttgggatggtttgtaagtggttttcgtagaggcggtttaagagttgtagcggtttttttttaggcgttcgtagttttcggtttaatttttacggtttaaggtagaagacgtttatttgtggaataggttttagtaaaagcggatagtaagagtttagggttgggttcggttcgggaattgggaattaggttttaaattggagcggggagacgggttgggaggcgttttatggtttttcgaggagcgtcgcggtgattgggaattttgtatagaggtgtttcgttttcgttagattcgttttatcgcgtttttacgtggttttttcgcggtaaaaaatttttttttgggtttcgtttttttttttttttgattggatagcgtatcgagttaggagggtttgcggcgcgcggattggcgttatgggtttcgagacgcgtttttattggttggttttttagtatggcggtttatgggggatagcggcggttattttgaatacgtggaggttatttggaaagcggagttcgggtttatcgagttagaggcgcgattttgtacgtttttcgttaggcggggtttatcgtttttttttttttttattttttagtttcggtttaagtcgcgttttatcgtcgtattttcgttttttttaggtattttagttacgtcggttttttggacggtcggttcggggttgggggcgtgtcgttttttggcggggttgggggagaaaaaggagtagagcgttttttggtcgattattttggagttgaggaggtagcgaacgcgcgttattcgggaatcggcgaggttagttttggttgtggttgtggcggttagtaattggcgttaagcggttcgcgtatgtttcgagcggggggttttgttgggggcggggggcggtggaaggtttagtgcgtatgtgcgggaggggttggagtgtaacgtttttgggaggaggtggggcgtgtaacggtgttcgggggtttatttttttattcgttttgtgtttttagtttatttttgttttttggataggtttttaaggtttagttgtaagaagagaagattggttaggcgcggtggtttacgtttgtaattttagcgttttgggaggtttaggttggaggatcgtttgaggttagagggtttgagttgtagtgagttttgatcgcgttaatgtattttaggtttgggcgatagagcgagattttgtttttcggtggggtcggggggagggggttgggaagaaaagtttttgttttttaggggtgttgtgggagtgtaatgaataatataataatattgttcgggtttgatggtttacgtttgtaattttcgtattgtaattcgaggtattttaaaaataaataaataaataaatattattatattttgtgtgtgtattttgtttttgagatagagttttgttttgtcgtttaggttggaatgtagtggtgtgattttagtttattgtaattttcgtttttcggatttaagcgattttcgtgttttagttaggattataggcgcgcgttattacgtttggttaatttttttatttttagtagaaatggggttttattatgtttgtttaagtgtgttttgtatttttttagtagagatgggggattttattatgttggttagtttggtttcgaatttttgattttaggcgatttgtttattttggttttttaaagtgttgggattataggtatgagttattatatttagttaatattatttgttgaattgttatatatatttttttacgtaatttttatggtttattttatgacgataaattaaggtttagtgtagttaaatattttgtttaatgtattaggtttgtgggagattttcgggttatagaggttaaatattaacgatttgttttttaaatgatattattgtatcgaatttttttttattattattaatatatttaggatttttttttttttttttatatttaaattatttatatttgtttttggttttttttttaaagtaaattttaaatttaattgttgtttttgtattttttagttatagaagattagttgggaagttggtgtttttttttttagagagagatttttatattatgataatatttggggtttggtttagttcggtggtttacgtttgtaattttaatattttgggaggttaaggaggggcgtatcgtttgagtataggagttcgagattagtttggtaaatatggtgaaatttcgtttttattaaaaatataaaaattagttaggcgtggtggtatgtatttgtaattttagttatttaggaggttgaggtaggagaattatttgaattcgggaggcggaggttgtagtgagttgagattgtgttattgtattttagtttgggtgatagagtaagattttgtttataaataaaaaaaagaaaaagaaaaaaaagataatttttaggttaaaatttttttttggtttttaaaaaggtttagaataaattttagttttttatttaggttttagtgttgttttttttttgatggaagtttttattattgagtttagtttttagtataattgttggatatatttagtttgtttttttgtggtttgtatatttttgtatttatcgtttttttgtttggaaagttttaggttttagtttaggatttttttttgaaaaggatttttttttttgttttattttttagtttattgttttataattgttatattatataaaagtattttatttattttttttttttatataatttttttagagatagtatattatttattttttttttgtgtgtttttgtttttattttcgaaatgtaatttgagtgaagaaaggaatttgttgttttttgttgttggtgtgttttagtgtttaggataagaagttgaagtttaagggagagaggtttaaagttgaaaattatttgtttttagagttattatgatttagtatttttatatttaggtattatttatttaagggaaatgaaaaattatatttataaagtttgtatgtgaatgtttatagtgattttatttatagtaatttaaaattagagaaataattttatgtggggtttatttttgtggggtattttttttatattagtaataaaaaggaataaataagtaatataaatgtgtatatacgattgggtatagcggtttatgattgtaattttagtattttgggaggttaaggtaggcggatttttttagtttattagttgaagattatggagattagtttgggtaatatggtaaaaatttatttttataaaaaatataaaaattagtcgggtgtagtggtgtatgtttgtagttttagttatttgggaggttgaggtgggagtggagtttgggaagtggaggttgtagtgagtcgagattatgtaattgtattttagtttaggtagtagagttagattttgttttataaaaaaaagcggggaggtgggggggcgtataaatgaattttaaaagtaatatgtttaagtgaaagaagttttataaaggtattttttatagaggttgagaggttcgaggttgaggggttgtatttggtgaaaatttttttgttggtggggattttgttgagttttgaagtcgtgtagggtattatatcgcgaggggttttagtgtgttagtttaggtttttttttttttttttataaagatattagttttatttttacggtaatttattaatttattaatttttgagtttattaatttattaatttatttatgaggatattatgatagagtttttatgttttaatcgtttttttaaggttttattttttaatattgttatattgaggattaaattttaacgcggattttggaggaatagatatttaaattacggtaattttttgtatatgaaattttggaaaaggtaaaattatagggagagaagatagattagtggttgttgatgttgggtgatgggcgaagttgattaagaggttggagtagttttatggagggacggaattgttttagattttgattgtggtggtgattatataatattgtatatttgttgaaatttgttaaaataaagtttttgattttatggagttttcgttttattgaggggagatagagtaaataaaaattaggagtcggtcgtggtggtttacgtttgtaattttaataatttgggaggtttaggtgggaggattatttgagtttaggagtttgagattagtttgggtaatatagtaaggttttatttttattaaaaataataaaaaaattatttagggtggggtgggatgtgtttgtagttttagttattttagaggttgagacgggaggatcgttttaatttaggagtttaaggttgtagtgagttatgattatgttattgtattttagtttgggtaatagagtgagattttgttttaaaaaaataaaataaataagaataatattaaaaaataagaaaataaagaaaaacgagtaataatggaattaatatttatttagaggatagagtattttttatgtattttgttatttttttaggcgtttttatgatataggtgttgtagtttttattttatagatgaggtaatttaattttagagaggttaagtgatttgtgggaggttatatagttagggcggaggagatagaaatagaatttacgatattcgattgtagaatttttgtttttattcgtgataatatattggtggtttaacgtttttttcggatattaaagtaatttttattgagaagtgacgttaagttatagtttttattttagtcgtgattttcgatagtggtttaataggtgattaacgggaaagcggtagtgtttgttatatacgggaggttagtaggtggtattagagggtcgttcggttgttttttttgcgttttagtttgtcgtagtttttagcgtgtttcggaagtgacgcgatcgattcgttggggcgcgttttttttattacgaggttattagggtgattgcgggatttcgatttgcgtcggagttgcgatgttagagtatttttgttatttttattttacggacgtgttgtagtgatattagaattttgcgtgcggtttattcgtgtttaatttttttgcgtttcgtttttgaatcgtatttatttgagtattattagattgatttattttaatattggtggggggtagcgaggttagttatgggttttttttttttaa

SEQ ID NO: 47 - DNA, 11523 bp, Artificial Sequence
  chemically treated genomic DNA (Homo sapiens)
attgtttaagacggaaagattttaagattgtgtgattttttttttttttttttttttttttttttttttataggtgtagaataattttttttttttttttcgtggttttttttttttttattttttttttttgttgtttgtaaagttgaatttggggttaggagttttaattgtaattttagattggaattttagatggtgcgtttaggattggaagtaatttttagtttattaattttatgggtttacgtatttgttttggttacggtttggtttttatttttattgtggtattaatgtagaataaattgagatatattttttatataattagttttagaatttaaaaagatttacggtataataatagaggtagtgtcgcggaatttttttattgaggattttcggggagttcggggattatttcgcggtggtattagaatagacgagtaattttagcggttttaggtattgcgaattgggggagagggggaaattttgtatcgtattcggtagtatttaacggtttcgggtttttagatagggttagcgaggagagttaggatagtaagtggggattggttaaaaaaaatcgatttaattttgaaatgattagaagaagttgggagtagttattataaagttttttttttgtttttttttttttttaattgaaggaatgacgttgaaatttttatcgttagcgcggggttgggaattattttaaatatttgttttgtagtttcgagtgggtagatttcgaagagttggagtcggcggggaggggaggaatagttgttgggttgttttgcgcgtggggttcggggcgcgggtttcggggagaggcgttagtcgaaagtttgtttttttttcgcgataggtagtagcgaggtcgagttattttttattacggtttgcgggtttcgcgcgtagtgtggttgttttcgtttttgatcgatcgtagcgttttggggtgtttatttagttgttcgcggtcgttgggtgattttcggagggcggtttaggcgtgcgtattggtttttggggttgcggttgtagtagtttagtttcgcgttttgttagatgtagtggatagcgtcggggtgaaagtaagggttgagaaatttttattgttttgtttttatttagtttcgatttttttatattgtaataattatgtattttcgaggtcgggatgtttgcgttttgttagtgtattaacgttatatggttttttaggggttgttttcgtttttgtattttattagttttgaagaggtagaggggtggtgggtaaaatttttaattggacgttgagagattcgggttttagttcggcgttgttattaatttgttttttgtttttaaatagtagtagtaataaaaattgtaaagttgattgagttaaaggtttatattgtttttttatttaatttttagaataattttatgaggtgggcgttagtattttattatttcgtttgattagtaaggaaattgaggtttagagagattgcggaattcgtttagggttatatagttgttggttatttggtagagttgaggttttattttggggttattaattttttgttttttatcgttgcgttttatagattgtttttttttcggttgtttgggttttagtttttttttttgtaaaacgagaagtttaatttgtagttttttttgttaatcggtggtttagattaggaatttttgttatagatttcggcgttgataggggtaagaaggtgggtgaaagaagggggcgtttagttttttatagtttgtttttttttgggatttcgcgaagggcgggtttcgcgagttaaaggaggtataggagagcgtttatcgttcgcggcgggtgaaggtgttatttgttttcgtgttaggttgtgagttttggtgtttagtttagggcgttaaggttagtgtagttggtatgttttttttggaaaattttaggtttttcgtagagaacgttatttataataaagaagaggatagagaggtatggagcgttttgcgattgtaggagtacgttagttttttagcgttggtttagtgtcgtttgggttttcgggtatgtggattcgttggggtcgtacggagattttttgtcgggtttttggggtttttcgattgcggttttttagtttagtattttttttttggtttcgtaggttgtagggaattttttttatttttttagtcggagaagtttaagtcgggcgagggggtatttcggggttcgtatcggtgtttttttttttttcgtttttataaggattttgagaaaataaatggtagaggagagaggagttttatatttgtttggtttttttttttttttatttatttttatattttttatttcggggtaaaaatttatttttgaaaaatgttggtagagatttacgtgtttttgttttatttgggttttataaatataacgatttatatttaagttagtttttttttagataatttttttttttttcgttaaaagtgttaaggatggtaaaagaagaaataattttaattttttcgtttggaaatgaaagttttcggttttttataaagggtttttcgttttttatagttgagttttagttaagaaaaacgatttttaagtagaaataataggcggggagaaggaagggagatatagggatttggggggtttttagggtaattggtagtgaattttgtttcgagagttttttttttatttaaaaaattaaacgcgcgagtttcgcgaaaggtttagggatagatcgtgtgggagaggattgagtagagagcgtgggggtagtgttttgtagaatttttttttttttaataataattttaaaagtttttgagtggagacgacgtaaagttaagtagtaaaggtggtttgggaggtaagcggagggtttaagtgtcgtatttttatttttagggttttttgcgtttacgggatgcgtatttttaagaagtgcgtttttcgagtaagttttgggttcgtatatatttcgggttcgtagttagaatttaatggcgataacgtttatgtaatgtaagttaaaaattaaagcgtaaaaaattattatgttatttattgaaacgttattttttgttaaattgtaattattttgttttatataagtttggttggaaagtttgtagttttagttcgggttagttaggtataggaggtcggattgtaatcggttgtttttttttcgtcgcgtttggtcgttttacgttgcgtcgtcgttgttgttttttggcgtttttgggattttatacgtatttttgaaatacgtttcgtttcggttttcggtttttttttttgtttaggggttgttttttaatagatattgatttttttagaagatttaaaaattaaattaaaatattttttattcgttttaaatatttgttttggggcgcgggggttgttaaatagagattagacgaagggagttagatttagcgaagtttttcgagtttttaaagattcgaatattaattcgcgttcgtgggtcgatggaggttttttttattttattttttggtttttttaattggttttcgttttttggttaattattgagtaattagaatggtattttcgattagggttataggtagtgttcggcggagtggttttaggagttattcgttttttgtcgggtttcgtatttaaatttttttttttattttttttttttaaattgggcgttaggatgtttcggtcggaatatacgtaggttttgggcgtttgtttaagggttttttttttttttaaattagtcgttgttttttcggtttaatcgtagaagaattagatattttttattggaaagggaaattaagtgttgttgattttaattttaggtaggcggtaatcgtttttcgtttggcgtaaattttattaagtaaataattattagtcgatcgaaatacgttcggtttataattggtgtaattttcggttatttaattgagggacgttcgtttttagtttcgatttttggaatttataaagggttatttttttttttagtgattttaagattatggttatttttttattcgatagttttagaagtaagagttagatttaagggtgtaaagtaagggtatacgtttttttgaagtttgattgagttttttttgcgtttttttgaagttttcgtttttttggagtttatttgtttttttttttaaattatttttttagattaataattttatttttatttttatcgtattcgattttgttcggatttattgtttatttgaacggattttttagtgagacgaggtttttatattggcgaaggttaagaaggggaggtggggggagggttgtgttatatcggttagttgagagcgcgtgttgggttgaagaggagggtgttttcgagagggacgttttttcggattcgtttttattttagttgcgagggcgtttttaaggagtagcgcgcgttgtttggtcgggtttgggttgttgagtgaatggagcggtcgagttttttggttttttttttttttcgcgtcgtcggttttttttatttgagttttgggaagttgagggtagttaggtagttggggtaaggagtttaaggtagcgtttatattcgggggtttttcgtaattcgatcgtttgttcgtttttttatttttcgtttttttttttatttatttatttatttatttatttatttagagtcgggacggtagtttaggcgttcgggtttcgtcgttttttcgtcgcgattttggatttttttttgttgtaggattcggtttttacgtgtgtttcggagtcggcgttttagtatacgtttcgtttcgggtttgggtgtttatagtagttagagtagtagggagttcgggattcgggcggtatttgggttaagttaggcgtcgtcgaggttagcgttgaacgtttttagggtcggaggagtcgcggggcgttcgggtttgagtcgtagtaaatgggtttcgacgtgcgggatttgaacgcgttgttgttcgtcgttttttttttgggtggcggcggcggttgtgttttgtttgtgagcggcgcggcgtagtgggcgtcggtgttggattttgcgttttcgggcgtttcggtttacgggtcgttgggcggtttcgcgtcgttatcggtttcgtcgttattttcgtcgtcgtcgttttatttttttattaaataggagtcgagttggggcggcgcggagtcgtacgaggagtagtgtttgagcgtttttattgtttattttttcggttagtttattggtatagtcggagtttgtcgttacgggtttttcggttttttttcgtttagttaggcgttattcggttaggttaggatgttttttaacgcgttttatttgtttagttgtttcgagagttagttcgttattcgtaattagggtaagtaggtcggggagcgttttttacgcgcggggtagtggcgttagggatttttcgttttaggatattttttttttttattttttttgatcgtagtttttatttagttgttttttaagggtcgtgaggatagcggaagcggcggttggggaggaggtcggagagtgggagtgtacgtaggtattggttttcgatattttttaaagttaggtagagttaggagtttgattgttcgtaagagtcgggagggcgtttggggttttttagagttcgagagatttcgggattgttagtttttacgggagtggaattaggagatcggcgtagtgtttggttttgttttggggagagttttgttaattaaggaaacgttaaattgttattaagcgtagcgttttttagacgtttggattttggattcggagtgggattagcgcgggggtgagcgtttgtgttgtgttgttttcgtagcgttaaaatgtttaggagtatttttagtttttataatacggtgttggtatatatttaggtgtatattaagtatcgtagagaattagaatgagtatatgtatttttagtaattaaatggttttttggaatagcgtcgtgttcgtggatagttttcgcgtatggtaatatagaagtggatttttattgggtttcgtttaggcggcggttacgtaggttttggggatggaagagaatttgatttattcgagtttaagttatgcgggattaggttttatcgtaggtagtggaaggaggtacgagttttggttttttttttagcgtatttggggcgtttttttattttgtaaacgcggggtttagttgggatagtatttttttaagatttggggttagaataaggatagggttattcgttgtgtttagttaggatataaggagggaattcggtatacgataagtattaggttggttttttatttcgcgtcgatgttcgtttatttttttttcgtttgggcggcgcggattcgaatttgcggagtttttgtagtttgttttttttatttatttttagtggatttttacgttattgagaatttaagttagttcggtttgattcggtaatttagtaaacgttttattaatataatggcggatgttttttttggagtaaaattattcgagggtttagggatcgggatgtttttggaatgcgtgggaagtagagtgtattttttgtaggaggtattttcgtttaaggttcgggagaagggttttgtttttgttgttcgtttttattcgcgttttttaaacgcgcgtttttaggtcgtttttattttagtttaattaggagtattcggttttcgcgaagttttggagaaatcgaaatcgttttttttttcgggagaatttgggattattgttttgtggaggaatcgtaagtagatttaagggttgtttttattttatgtttttagttagtgaaattagtgttttgtatttaaggggcgttgggataatttattggtcgttgaggtttgtgttttttgattagatcgcgttatttttgtttagtaggttggtgttatttttggggagtttttaggttttagtgttttcgtttataagaggatagttgagatgggtaatttggagattgggttcggtttgaagttatattttatagatgtagaagcgttatttattatttttttggggttttaaatatggaattcggtaatttatttaaatatttgtgattgagaaataatgaattcgagagtattgtttgtatgtgtgttatttggaggcggttgagaaattatcgaatttatgtttttggggtataaaatattattacgttattatttttttagtatttttaggggatttttgaaatttgggttttgtcgtttcgtttgggttttttgtttagttttttttagggtaggtttggtgtttgggattttattatatgtcgtggggggtgggattgtgggttttgtagttagtaggtattatatttttggaaaatatttggatttttttgtaatatataggcgtggttgttatggagaaaaagttaaaaggggattaggattagtaggtgaatgtattttttttttttattttggagaaaaagtttaatggagagagggttttagatttaagttatatagtttggaagtattatttttaggtttaagttttgttttgtagtgaaaatagatgggtttattttatttagtttttgaggtttattgggtagtttggatgtgagaagcgtttcggttgttattttggagtgggtaagggtggttttcgagattttgggtttattttttggatttttagggtttttgttgtttttttaggaatgtagggtttggtttaagatttgggttgtgagaggtaagggtattaatttttaaaaatgtggaaatggttattagagcgttaaggttaaattttaggggagaggaattaaggtcgtttttggatttttagggtagtttagttatggtgtataggtaggggtaattgttggtatttatttataatcgtttaaaattttataagtatgtttatattttaaatttttaaatattatattttgtattttaattttgtaaatattaatttagtaaatattaatcgtttatttggttaggtattgggttttgaatattaattaagataatggtttcgagaatttttgtaagaagtttattagttaattttggagaggttttttgttttggatgaggaaatttaggttttatgagattaggtggtagaggtgggatttgaatttagattatgttagggtgtttttattttttttttagggattttggttttatcgttgagatggattttttttggtttgcgggaggggtattaaatttttagtttatgtgtgggggttgacgggtttgtgagggtagatgtggggtgaggatttgagtagttttagattagatgtaaggtttaaggaggaggggaaaaaagtttgtttgggtcggacgcggtggttcgaggcggttggattatttgaggttaggagtttgagattagtttggttaatacggtgaaattttgtttttattgaaaatataaaaaaaaaaattggtcgggtttggtgacgggcgtttataattttagttattcgggaggttgaggtataagaatcgtttgaattcgggaggttgaggttgaagtgagttgagatcgcgttattgtattgtagtttgggcgatagagcgaaatttcgtttcggaaaaaaaaaaaaaaaaaagaggttgtttgttagtttattgatttcgtagtttcgtaggttcgtagaattttaaggtatgattaggtttgggattattaggttattttagggttaggtgcggaggtttgcgacgttcgagggttaaaggttttttttttcggttatataggagagggtattttgttgggggataggttttttttaattatagtgtagttgtagttatcgtttttagttttttgagtatttttttggttgagtttgttgtttattttattttttagtttttacggttcggttaggttaggcggttttcggtttttttgtagtcgtcggcgggggaggagggtatagagcgcgtttcgttttttagcgtacggttaaggttgcgtttttttttcgggtcgggattaatcgtgggaaaggcgttattttggttattcgattttttttttttaaggtttgtataaggagtttttgaatacgttgttttttttagtcggtagttttattttttttggtttttgttttcgtatttttcgcgttaggttaagcgttgggtttagggatagcgcgttttaattaaattcgtgttcgataagtttttaattaaaagagattttttttcgtttcgtaggcgtttttattattgtttttttcggggggatttgaaggagagggtttgaggtcggtttttgttcgtcgaggtttgcgtgttcggtttgggaggaggtttaggagggttcgcgggttacgggtatttttgggttcgagttttggggtgcggacggacgtttcgagagtgggtgtcgcgattcgggatttacggttttcgtcgggtacggatagttgcggagtagggttttgaggattgtgtagtgttttgggtttttgtttatttttgggtttaggaatggagaagggttcgtttagagaaaattttttcgtagtttttatttcgtttttttttttttttttttttttttttttttttttttttttttttttttttttttttttgtgtttgtttttttttttttttttttttttttagtgtttttttagaaattcggtttttatttcgggtaatagtgggtgttttgagttaaatttcgtttgtaagtttatttataggttttaaagaaggttaggttttaggttttaaaaggaagtttgtggaagtttaaacgtgttcgtttatgtaggagagttaacggggtcgggggttatttttgtttatttagtaggagagaaatggaggttttcgaggttatatgataaaagttagtggttttttaaatttttagtgtgtggtgttgagtagtgtgtgagatttaagtttggatttgtattattcgggagttaggatttgtttttttttttttttttttgtattttgttatattattttttaggtttatgtttttgttgttttagagaagttttttttttttttttttttttttttttttttttgggcggggggtggtggtgtgtgtgtatgagcgttcgtgtgtgtttcgaaaatggaggtaacgatgttttgggttttgtttatcggttgagttttgtttaagtttttggaggtattttggttaaatagtgtaagagtgggagaatgggtgttgtttgatttaatttatttttgagaattttgtgaagtttggagatttagggtagttttgggttaggaggatttgaggttgttggggtggttttgttaggattttataggagtagttttttttagttattgtgtttggattttaggttatagatttcggaatttgtagaggaatgagattttatttttgggtttcggggttaatgacgtatttttagtcgaaggatttttttttttagaggtagtaatagttttttagaagtttgtggggtataagtttaaagtaatttaataataaaaattataaaagattatgttttttaattgaggttttacgtttttttttttattttgggggggggggggaatgttaggatttttttagggggaaattgaggtaaaggatcgaagtattattatggagggaaagggagatatagtgttaggtatattttaaaggaaattggttgtttagtttggggagtgaggaagttggtttttatagtagtggttagggtcggatttttgggcgtaaggtgggttttataggggggaggaggaggagagcgtagggtcgttatttgaaggtttaattggaaggggtttttgtttttttttttattagtttttttttgggtgttatggtgttaggtcgggtagttttagatagataatattattcggtaattattttttttatttttaagattaggttatttaattggtttcgagtaattaatgaaagttggtgcgcgggtttttgatttatagttcggagttaacgcggggttagtttagtagatttatttcgtttgttcgcgttgtttttgcggaagagttgtagtttatttttggggggtgaataattttttttgtcgattaggtaacgagttttatatttaatttgttaggggttcgttgtagaagcggtagagatcgtagaagattgcggtataaataaattgggaaaaagcgaggtgggggttttagttagaaaaggatggagaagtttgttttaaggttatatttagggatttgggtcgtttttttgtcgaaagttttggaggtttgtggggttggattttttttcgttgggggttcgaatgcggggtttagcgtatatttttttcgttcgtggttggtttagatttattgtttcgttttgcgagagtatcgttgatattgtgttttttttcgtcgttttcgtagg

SEQ ID NO: 48 - DNA, 11523 bp, Artificial Sequence
  chemically treated genomic DNA (Homo sapiens)
tttgcgggagcggcggagagaagtatagtgttagcggtgttttcgtaagacggggtagtgggtttgaattagttacgggcggggggggtgtgcgttgaatttcgtattcggatttttagcggaggagaatttagttttataagtttttaggattttcggtaggaagacggtttaagtttttggatgtgattttgggataggtttttttatttttttttgattaaaatttttatttcgtttttttttaatttatttatgtcgtagttttttacggtttttgtcgtttttgtagcgaatttttggtaaattaagtataaaattcgttgtttgatcgatagagaaggttgtttattttttaaaaataaattgtagttttttcgtaggagtagcgcgggtaagcgaaatgaatttgttgggttaatttcgcgttgatttcgagttgtaaattaggggttcgcgtattaatttttattaattattcggagttagttaaatggtttggttttaaaaatgggaagagtaattatcgagtaatgttatttgtttggggttattcgatttgatattatgatatttaagggaaagttggtgagggggaaaataagggttttttttagttgggtttttagatggcgattttgcgttttttttttttttttttttatgggatttattttgcgtttaggggttcgattttgattattgttgtaggagttaatttttttattttttaggttggataattaattttttttagagtgtgtttgatattgtatttttttttttttttatggtagtgtttcggttttttgttttagtttttttttagggaaattttagtatttttttttttttttaaagtgagaaaaagagcgtggagttttagttggaaaatatagttttttataatttttgttattaaattgttttaaatttatattttataagtttttggaaagttgttgttgtttttggggaaaaggatttttcggttaaagatacgttattggtttcggaatttaaggatggggttttatttttttataagtttcggagtttgtggtttgaagtttagatataatggttaaggagagttgtttttatgggattttggtagggttattttagtagttttagatttttttggtttaggattgttttgggtttttaaattttataaaatttttaggagtaaattgggttaaatagtatttatttttttatttttgtattatttgattaaagtgtttttaaagatttaagtaggatttagtcgatgagtaggatttagggtatcgttatttttattttcgaaatatatacggacgtttatgtatatatattattatttttcgtttagaaaaaaaaaaaaagaaaaagaaaaaaaaaaagtttttttggggtaatagaggtatgagtttggagggtggtgtggtagagtgtaagggagggaaggagggggtaaattttaattttcggatagtataggtttaggtttaagttttatatattgtttagtattatatattggggatttgagaagttattagtttttattatatgatttcgagggtttttattttttttttgttaagtgggtaaagataattttcggtttcgttagtttttttgtatgggcgagtacgtttgggtttttatagatttttttttgaaatttgaggtttggttttttttgaggtttatagatgagtttataaacgaaatttggtttagggtatttattattgttcggagtgaaggtcgaatttttgaaaggatattaaaaagagagagagagaaagagagatagatatagagagagagagagagagggagggagagagagagagagagagagagagagagagagagacgaaatagaagttacgaagaagttttttttagacgaatttttttttatttttgagtttaggagtaggtagggatttagggtattgtataatttttagagttttgtttcgtaattgttcgtgttcggcgagggtcgtgggtttcgagtcgcggtatttattttcgagacgttcgttcgtattttagaattcgggtttaaggatgttcgtggttcgcgagtttttttaggtttttttttagatcggatacgtagatttcggcgggtaaagatcggttttaaatttttttttttaggttttttcgggaggggtagtggtgaaagcgtttgcggagcggagggaggttttttttaattagaagtttatcggatacgggtttgattagagcgcgttgtttttgggtttagcgtttggtttggcgcggagagtgcgggggtaggggttaggggaggtaaagttgtcggttggaaggagtagcgtgtttaaaggttttttgtataggttttggagggagagaatcgagtggttaaggtagcgttttttttacggttagtttcggttcgggaggggagcgtaattttgatcgtgcgttaagaggcgagacgcgttttgtgtttttttttttcgtcggcggttgtagagaagtcgggaatcgtttggtttggtcgggtcgtgagagttgaggggtgaaatggatagtaggtttagttaggaaggtgtttagaaggttgaaaacgatgattgtagttgtattgtgattggggaaaatttgttttttaataaaatatttttttttgtgtgatcggaagagggagtttttggttttcgggcgtcgtaggttttcgtatttgattttagggtggtttgatgattttaggtttaattatgttttagggttttgcgagtttgcggggttgcgggattagtggattagtaggtaatttttttttttttttttttttttcgagacggagtttcgttttgtcgtttaggttgtagtgtagtggcgcgattttagtttattttaattttagtttttcgggtttaaacgatttttgtgttttagtttttcgagtagttgggattataggcgttcgttattaagttcggttaatttttttttttgtatttttagtagagatagggttttatcgtgttggttaggttggttttaaatttttgattttaggtgatttaatcgtttcgagttatcgcgttcggtttaagtaagtttttttttttttttttttaagttttgtatttagtttggggttatttaagtttttattttatatttgtttttataaattcgttaatttttatatatggattaagagtttggtgtttttttcgtaggttagaagaaatttattttaacggtggggttaagatttttggaaaaggagtagaaatattttagtatggtttgggtttaaattttatttttgttatttaattttatagaatttggatttttttatttaaaataaggggtttttttaggattagttggtgagttttttgtaaaggttttcgaggttattgttttaattaatatttagaatttagtgtttgattaagtaggcgattgatgtttgttaaattaatgtttataagattaggatgtaagatataatatttaagaatttaaaatatgaatatgtttgtgaagttttgggcggttgtgagtgggtattaataattgtttttgtttgtgtattatggttagattgttttagggatttagagacggttttgattttttttttttggggtttggttttggcgttttgatggttatttttatatttttgagagttgatgtttttgttttttatagtttaagttttgggttaggttttgtatttttggggaagtagtaggaattttggaaatttaaagaataaatttagaatttcgagggttatttttgtttattttaggatagtagtcggagcgttttttatatttaagttgtttaatgagttttaagggttgggtaagatggatttatttgtttttattgtaagataaaatttaaatttggagatggtgtttttaggttatatgatttgaatttagggttttttttttattgggttttttttttagggtggagaagaaggatatatttatttattagttttggtttttttttaattttttttttatggtagttacgtttgtatattatagaagaatttagatattttttagaagtgtaatgtttgttggttgtaaaatttatagttttattttttacgatatgtgataagattttaggtattagatttgttttgaaaagggttggataagggatttaaacgaagcgatagaatttaggttttaaaaattttttagaagtattaaaaagataatggcgtagtagtattttgtgttttaggggtatggattcgatggttttttaatcgtttttaaatagtatatatgtagatagtgttttcggatttattgttttttagttatagatgtttagatgggttgtcgagttttatatttaaagttttaagagggtggtgggtagcgtttttgtatttatggagtataattttaagtcggatttaatttttaggttgtttattttagttgtttttttatagacggggatattgagatttagaaattttttaaaagtaatattagtttgttaaataaaggtggcgcgatttgattaaagaatataagttttagcgattagtaagttgttttaacgttttttgagtataaaatattaattttattaattaaaagtatagagtggaggtaatttttgggtttgtttgcggtttttttataggatagtgattttagattttttcgaagaaaagggcggtttcgatttttttaaggtttcgcgggggtcgggtgtttttggttaggttaaggtaggagcggtttgaagacgcgcgtttagaaggcgcgggtgaaggcgggtaataagggtagagtttttttttcgagttttgggcgaaggtattttttgtaaaagatatattttgttttttacgtattttaaaaatatttcggtttttaggttttcgagtaattttgttttaggaaaagtattcgttattgtattagtaaagcgtttattaaattatcgaattaaatcgaattggtttaggtttttaatagcgtggaaatttattgaaaataaatgaagagggtaaattataggggtttcgtaggttcgggttcgcgtcgtttaggcgaaagagaggtgggcgggtatcggcgcgggatgagaaattaatttgatatttatcgtgtgtcgagttttttttttgtattttgattaagtatagcgaataattttgtttttgttttaattttaggttttgaagaaatattgttttagttgagtttcgcgtttataagatgaagaggcgttttagatgcgttgaaagaaaggttaaagttcgtgtttttttttattgtttgcggtagaatttggtttcgtatagtttggattcggataagttaagtttttttttatttttagaatttgcgtggtcgtcgtttgagcgaagtttagtgaagatttatttttgtattattatacgcgggagttatttacggatacgacgttgttttagaaagttatttagttattggaggtgtatgtgtttattttagttttttacgatatttaatgtgtatttaagtgtgtgttaatatcgtattataagggttggaggtgtttttggatattttagcgttgcggaggtagtatagtataggcgtttattttcgcgttggttttatttcgaatttagagtttagacgtttgaaaagcgttacgtttggtgataatttggcgtttttttaattaataaaattttttttaaggtagagttagatattgcgtcggttttttggttttattttcgtggggattagtagtttcggaatttttcggattttaaggggttttagacgttttttcggtttttgcgaatagttaggtttttagttttgtttggttttggaggatgtcgggggttagtgtttgcgtgtatttttatttttcggttttttttttagtcgtcgttttcgttatttttacggtttttgggaagtagttgggtaagagttgcggttaaaaggggtaggagaggggggtgttttagagcggagagtttttggcgttattgtttcgcgcgtagggggcgtttttcggtttatttattttgattgcgaatagcgggttggttttcgaggtagttgggtaggtagggcgcgttaggaaatattttggtttggtcggatgacgtttggttgggcggaggaggatcgaagggttcgtagcgataggtttcggttgtgttagtgaattggtcggaaaagtggatagtgaaggcgtttaggtattgtttttcgtgcggtttcgcgtcgttttagttcggtttttgtttgatgaaggagtgaggcggcggcggcgggggtggcggcggagtcggtggcggcgcggggtcgtttaacgattcgtaagtcgaagcgttcgggggcgtaaagtttagtatcggcgtttattgcgtcgcgtcgtttataggtagggtatagtcgtcgtcgttatttagggaggggacggcgggtagtagcgcgtttaggtttcgtacgtcggagtttatttgttgcggtttagattcggacgtttcgcggttttttcggttttggagacgtttagcgttggtttcggcggcgtttaatttggtttagatgtcgttcgggtttcggattttttgttgttttggttgttgtaggtatttaggttcggagcggagcgtgtgttgagacgtcggtttcgggatatacgtggaagtcgggttttgtagtaagaggaagtttaggatcgcggcgaggagacggcggggttcgggcgtttgggttgtcgtttcggttttgggtgggtgggtgggtgaatgagtaggtgggagggagggcgggaagtgggggagcggataggcggtcgggttgcggagagttttcgggtgtgggcgttgttttgaattttttattttagttgtttggttgtttttagttttttaaagtttaaataagaggggtcggcggcgcggggaagaggaggagttaggaggttcggtcgttttatttatttagtagtttaagttcggttaggtagcgcgcgttgttttttgggggcgttttcgtagttggggtgagggcgggttcgagggagcgtttttttcggagatatttttttttttaatttaatacgcgtttttagttggtcggtgtggtataattttttttttattttttttttttggttttcgttagtgtgggagtttcgttttattggagagttcgtttaggtaagtagtgagttcgggtagggtcgaatgcggtgggagtagagatggggttgttaatttaaaagagtggtttggagggaggggtaggtaggttttaagagggcgggaattttaggaaagcgtagaaagaatttagttaagttttaaagaagcgtatatttttgttttgtatttttgagtttggtttttgtttttagaattgtcgggtaggggagtggttatgattttggggttattggggaaagaggtggttttttgtgggttttagaggtcgggattgaaagcgaacgttttttagttgggtggtcgggagttgtattagttataagtcgggcgtatttcgatcggttagtagttgtttatttggtgaggtttgcgttaggcggaaggcggttgtcgtttatttaaaattggagttagtagtatttagtttttttttttagtgaggaatatttaatttttttacggttaagtcgggaaaatagcggttagtttaggagggaagaaaatttttgggtaaacgtttaaagtttgcgtatatttcggtcggagtattttggcgtttagtttggggaggaggggtgaaggggagggtttggatacgaagttcggtagggagcgggtaatttttggagttatttcgtcgagtattgtttgtggttttggtcgaggatattattttggttgtttagtgattgattaggaggcggaagttagttaaggggattaaggagtggagtagggagaatttttatcggtttacgggcgcgagttagtgttcgaatttttgggagttcgaagagtttcgttaaatttgatttttttcgtttagtttttgtttggtagttttcgcgttttagagtaggtgtttggggcgggtagggggtgttttggtttggtttttggattttttaaaggagttagtatttattgggaaataatttttaggtaaggagaagaatcgggggtcggagcggagcgtgttttagaggtgcgtataaaattttaggggcgttaggaggtagtagcgacggcgtagcgtgggacggttaggcgcgacgggagggaagtaatcggttgtagttcggttttttgtatttggttggttcgggttggggttgtaagttttttagttaaatttatgtgaagtaaagtagttgtagtttgataaagaatggcgttttaataaatgatatagtaattttttacgttttggtttttagtttgtattgtataaacgttgtcgttattaaattttggttgcggattcgaagtgtgtgcgggtttaggatttattcgaagggcgtattttttgggaatgcgtatttcgtaggcgtaggagattttgagggtaaagatgcggtatttgagtttttcgtttgttttttaggttatttttgttgtttgattttgcgtcgtttttatttagaagtttttaaaattattattaagaaaagaaagattttataagatattgtttttacgttttttgtttagtttttttttatacgatttatttttaaatttttcgcggggttcgcgcgtttggttttttgagtggagaaaggattttcgagataaaatttattgttagttgttttaagaattttttagatttttgtatttttttttttttttttcgtttattatttttatttggaagtcgttttttttaattaggatttaattgtgaggggcgaggagttttttatgaaaagtcggggatttttatttttaaacgaaaagattgagattgtttttttttttattatttttggtatttttagcggggggagaggaggttatttgaagggaggttggtttgaatgtgagtcgttgtgtttgtgaaatttaggtaaggtaaagatacgtaaatttttgttaatattttttaaaaataagtttttgtttcggggtgagggatgtaggggtggataggaggaaaggagagttaagtaaatgtagaattttttttttttttgttatttatttttttagaatttttgtgggggcggggaggggaagagtatcggtgcgaatttcggggtgttttttcgttcgatttggattttttcgattaaagaggtgggaggagttttttgtagtttgcggggttaagaagaaagtgttaagttgaggagtcgtagtcggaggattttagggattcgataggaagttttcgtacgattttaacggatttatatgttcggaagtttaggcgatattaagttagcgttggggaattgacgtatttttgtagtcgtagggcgttttatgtttttttgtttttttttttgttgtgggtaacgttttttgcgggagatttgaggttttttaagggggatatgttagttatattggttttggcgttttgagttaagtattaggatttatagtttagtacgaaggtaggtagtatttttattcgtcgcggacgataggcgtttttttgtattttttttagttcgcgaggttcgtttttcgcgaggttttagagaaaagtaggttgtggaaaattgggcgttttttttttttatttatttttttatttttgttagcgtcgagatttgtagtagaggtttttggtttgaattatcgattggtaaagaaagttgtagattaaatttttcgttttatagagaaggaaattgaggtttagatagtcgaaggagaggtagtttatggagcgtagcggtaaagagtaaggggttggtggttttagaatggaattttagttttgttaggtaattaatagttgtgtgattttagacgagtttcgtagtttttttgagttttagtttttttattggttaaacgggataatgggatattagcgtttattttatagagttgttttgaggattagataggagagtagtgtgggtttttgatttaattaattttatagtttttgttattattattgtttaaggataggaaataagttagtggtaacgtcgagttgaaattcgggttttttaacgtttagttggaggttttatttattatttttttatttttttagagttaatgggatgtagaggcgaggatagtttttggaaaattatgtggcgttgatatattggtaaagcgtaggtatttcggtttcgaaggtgtataattattgtaatatgaaaaaatcgaggttgggtaggagtagggtagtgaggattttttaatttttatttttatttcggcgttgtttattgtatttgatagagcgcggagttgggttgttatagtcgtaattttagggattagtgcgtacgtttgggtcgtttttcgggagttatttagcggtcgcggataattgaataaatattttaaagcgttgcggtcggttaagggcggggatagttatattgcgcgcggggttcgtaggtcgtaataaagagtggttcgatttcgttgttgtttgtcgcgggagaggaataagttttcgattagcgttttttttcggggttcgcgtttcgagttttacgcgtaagatagtttaatagttgtttttttttttttcgtcgattttaatttttcggaatttgtttattcggggttgtagggtaagtgtttaggatggtttttagtttcgcgttggcggtgaaaattttaacgttatttttttaattaaaaaaaggggggggtaagggaggggttttgtgataattatttttagttttttttgattattttaaaattaagtcgattttttttaattagtttttatttattgttttaatttttttcgttgattttatttgggagttcggaatcgttaggtattgtcgaatgcggtgtaaaattttttttttttttttagttcgtagtgtttggagtcgttggggttattcgtttgttttgatgttatcgcgagatggttttcgagtttttcgagagtttttagtgaaaggatttcgcggtattgtttttattattatatcgtaaatttttttaaattttggaattaattatatagaggatatgttttaatttgttttgtattaatgttatagtggggatggaggttaggtcgtggttagagtagatacgtaggtttatgaaattgatgaattgagagttgtttttagttttgagcgtattatttggaattttagtttgaggttataattagaatttttgattttagatttaattttgtaaataataggggaaaaaaatggggaaaagaaaaattacgagagagggaaaaaaaattattttgtatttgtaaaaaaaaaaaaaaaaaaaaaaaaaaaaaaaaagttatataattttaaaattttttcgttttagataat

SEQ ID NO: 49 - DNA, 6050 bp, Artificial Sequence
  chemically treated genomic DNA (Homo sapiens)
tatttttttttgttaaaaagttaagagttgtttagaaggaaaaaatagttttttttaaagaggttaaatttttagtattaattagttgtagtagtggtatgtgtgtgtgtgtggggggggggtggtatggtaattttgtgtttttagtgttttaaataggggtaatttttttgtttacggtttgagttatcgaatgagtaatttcgattttttaagattttttattgggtttacgtgtgtgtgagttttataggaattgtggaatgttttttttttttgttgggtttagatatttagaatgaataaattaaagggtagtggtaatatggttattgttattgtagataatgtggtatttatatatgggtattagttgttttttttatggggtttaggaataagggtaagtttgattttttattatgaattattggggtgttttttatatatagaggttgtattagttgaaaatagtttaaatattttgtaattttgttttttttaatttttgtttatttatattttagaataaaagagtttgtttagtttttttaaagatttaaagaatattatttatttgttttttaagtatttaaaaagtataatcgtttatatttattttggttggatgaggatatgtatttatttatttatttaagagatatttattgttagatttggtggtttacgtttgtaatttcggtattttgggaggtagaggtgggaggattatttgaggttaggagtttaaggttagtttgggtaatatagcgagattttatttttataaaaaataaaaaattagttgggtatggtggtatgtgtttgtggttttagttatttgggaggttgaggtaggggtattgagtttaggagtttaaggttgtagtgagttataattatattattgtattttagtttgggtaatagagtgagattttgttttaaaaaaaagaaagaaaaagaaaaagaaaaggggtatttattgaatatttattatgttttaggtattgtgttagattttaagtgaatattagtatatgaataagataaaggcgaaaagttattaaataagtttaagttgatttcggtatatgtatttttttgatttttggtttcgtgttttgattataattttttattattagattagatttttttaaataaataattatttttgtatgttggggatgggttgtgtgcggtagtatttacgtaggcggtatagatagtagttttttatttaatgttgtaataatattaggttaaataatgtgtattgattttaaaagtgtggggttaggttttttttaagtgttatagggagagtgtaaagtaggaaaagtttatcggatgaggaaatattgtagagggaaagtgaatttttttttaatttgggttaaaatttagatgtggaattttatttttttttttatttttggatttttagataggaggaatttagtatatagataattatgaattatatatattttggttttatatgtttagatttgtttagagtatgaaatttttgttttgttggaaggtagcgtcgtgtttacggaggtatataagtatttgttttaaagttattttgatttgtagatttgtaaatggtaaaaataattttatatgtttgttttgatttgtttttatttttaggttattttgtgtgagttttattttttagaatgtgattttgtagttttgaaatggatattatgagtagattgagatgtgagaatatgttagaatgattataggttcggatgttagtggggtaggagagggagtttgagattgtattggtttatattgtggtttttggttgagtatttggtttgtttggatgatgttttggttttatttaatttttattattttattatttagaggatagaggatttgagttttatttttgtattgtagttattttttttgggatttgtttttaagtttttttttgtgttgtttggtattttttttttattttttttaaattatttattgttattttgtaagttcgattgatttgttggtttttttatgagattggaatttttttgagggtcgggataggtttattttttttattatagtgagtattagtttttagtttagttaatagttttgttaaataaataattgaataaaattatttgttaaataatggtttgttttttttagaggatggatttagtttgttttttttagaggatggatttagtaagtttttaattttggttataatggtgttagaaggaaagagttaagttatttggaggaaataggtttatttaaagatttttttttttttttttttttttaattggtaaaggtaggataagtgtatttgagataaattttggatataaaattttgatatattttttaggtattggtcgagatgttttggatttgaaagggaagtaaattaaattattttaggtttttttttttttttttttggagatagaattttgttttgttgtttaggttggagtgcggtggtacgatttcggtttataggaatttttgtttttcgggtttaagtaatttttttgttttagttttttgagtagttgggattataggcgtgcgttattatattcggttgttttgtatttttagtagggatagagttttattatgatggttaagttggtttcgaatttttggttttaagtgatttattcgtttcgggtttttaaagtgtaggaattataggagtgagttatcgtatttagttaggttttttgttaagtggtttgagatttagttgtgaatggtagttatggttagatttaggaatttaaagtttgatttattttgtttgaagttaatattaataataagagagatgtatttggttttataatttttttttttttcgtttttttttttttttttgtaattaaggatagaattagaagtatcgaaggtcgtagaattgttttaggatttagagtagttttaaggaatttgtgtttacgtattatgtgtgttttttcgtttttttttttttttatgagtgagaaaaaaaagcgtttaaatttttattaatataaattaatgatatataatgatgaaattttgtttttatttttgtttgtgatagggaatgtaaaaatagtaagtggtttagttttacgaattttcgttttttgtttttttcgtttttgtcgggttggatttttaagaatggaggttagcgtatagtttcgcgcgggtcgtttagttttcggattcggcggatgatgttaggcgacgggagcggtcgcggtcgggtcggggaggtcgcggtttaggggagttgggagggagggtggtttcgttaggtcgacggcgcgttcggtcgcgcggcgttgtttggagacggttttggcggcgttgtgttgttgtaaatagtcgtttttttgttattatttatagtaggattttttggttttcgggcgcggcggttggaggtaggtttgcggttcggtttttcgcgcgtttcgaattattcgttcgtcggttttattttgtttcgtttttttttaggtgtttatcgcgggtttcgattttcgggttcgaagagtggagaagggaagatcggggttgtgcggggatatgcgttttcgcgttttggaggtggttagcgcgttggggttgagtttcggtagcgtgatttcggttgttttacgtagtagggtaggagattggggggcgtggtatattttggagtattttgtttttttaaagtttcgtgttttaggacgtggagtcgtttttggggttttagtagtcgaggtatttcgtttaggcgtagttggatattgtttttttagttttcgttttttattttttaagttcgcgttggaaaattattcgttgcgggttttcgtaagtatagttttttggcgggatcgaattagtttttagcgtagatttgagtttttcgtaggaagtatatttcgttttgttatttcgaattgattattttgtttatataattatatttcgtattttttatttttggggtttagtttagaatcgggtagatattttttttaaatgttttcgtacgtaggttttgtatagtgtttatttgttggtgttttagggatttgatagtttttttaatatttttatatatggtcgagaaaaataaataaataaatgcgttgttttttttaaaaaaataaataaataaagtatttagtatcgtaaagtaggttatcgtatttttttattttggattttttattttttgtttttaaacgtaggaatagtgttagtattgttcgagttcgagggttggaggttaggggatgaaggtttgtttttacgttttgtattgaattagggttagaattggggatgggggtaggggcgtattttttcgggagtcgaggtttaagttttcggggttttgtattcgatgtcgttttttttatttttgagttttagaattgtttttagttttcgtataagggtaaaaaggcgttttttgttttatttttttcgatttcgggaataagggttcgtattgaattaggtgcgaatgtttttttttattttgcgtcgttttcgtttttttttttttagtcgcggttttcgttttttttcgtattgtattttcggtgttggttgtagttcgcgagtagttttcgttaatttttttttttttatataggatgtttatattaggatatttgcgttagtaggtttttacggtttttttttgtagttttggggggagttattttcgaaattttttattttggggggtttacgagatttttgagataggaattgcgaaatgtttacgagattaggatacgcgttaaggcgggggtagggagttgcgagcgttggggacgtagtcgggcggtcgtagaagcgtttaggttcgcgcgttatttttttggcgttatcgtggttgagttcgtgacgtttatatttatttataaaacgtttgttataaaagtagtggttgcggcgtttcgtattttaatcgtatttgtagcgagtatttgagaagttaagattgagtcggcggtcgcggcgtagcgaacgagtagtgatcgtgtttttatttagttttgttttatagcgtttatttgttttcgtttttcggtttttcgttcggttttgtttaatcgttacgatgatgttttcgggttttaacgtagattacgaggcgttattttttcgttgtagtagcgcgttttcggtcggggatagttttttttattattatttattcgtagattttttttttagtatgggttcgtttgttaacgcgtaggtaaggttggtttttcgtcgtcgcggggtcgggggtttggggtcgcggaggaggagatatcgggcgggacgttttagtagatgagtagggggtttttttgtgtttggagggaggttgtcgtggtcggagcggtgtcggttcgggggttcgggatttgttttgagcgtacgtacgtttgttatagtaagaattggtttttttttcgggaggtaggttcgttttgagtaatttttggtttgtattttaggacggatttttgatattagttggagtagacgtgttttaagtataaattcgttaattagagtttggttttttcggggaggtggtagaaagcggtaattttttttttttcggtagtttggagtacggaggagggatgagggaggagggtgtagcgggcgggtgtgtaaggtagttttattgataaaaagcgagtttattttggagatttcggagcggcgtttgcgttagcgtagacgttagggatatttataataaatttttttttaagtaagtgatgttgaagggataacgggaacgtagcggtaggatggaagagataggtattgcgttgcggaatgtttgggaggaaaagggggagattttttatttaggatgagggatatttaagatgaaatgttcgtggtaggatcgtttttttttattgttgtatgcggtattgggaattcgttttatttgtgttcggaatttgttcgtttacgtcggttttttttttttgttttgttttagg

SEQ ID NO: 50 - DNA, 6050 bp, Artificial Sequence
  chemically treated genomic DNA (Homo sapiens)
tttagaataaaatagaaggggaaagtcgacgtgagcgagtaggtttcggatataggtggggcgagtttttagtgtcgtatgtagtagtgaagagaaacgattttgttacggatattttattttaaatgttttttattttggatgaaaggttttttttttttttttttaggtatttcgtagcgtagtgtttgttttttttattttgtcgttgcgttttcgttatttttttagtattatttgtttgaaagggggtttgttataaatatttttgacgtttgcgttgacgtaggcgtcgtttcggagtttttagaatgaattcgttttttattaatgaaattgttttatatattcgttcgttgtattttttttttttatttttttttcgtgttttaggttgtcgggggaggggggattgtcgttttttgttattttttcggagaagttaggttttagttagcgagtttgtgtttgggatacgtttgttttagttaatgttagagattcgttttggagtgtagattagaggttgtttagaacgaatttgtttttcgaagggggaattaatttttattatggtaagcgtgcgtgcgtttagagtaagtttcgagttttcgagtcggtatcgtttcggttacggtagtttttttttaggtataagggagttttttatttatttattggagcgtttcgttcggtgttttttttttcgcgattttaagttttcggtttcgcggcgacgggaagttagttttatttgcgcgttgataggcgagtttatgttggagaaggagtttgcgggtgagtggtagtaagagaggttattttcggtcggggacgcgttgttgtagcgggaggatgacgtttcgtagtttgcgttgaagttcgagaatattatcgtggcggttaggtaaagtcgggcgaggggtcgaggggcggagataggtgggcgttgtggagtagagttgggtaggagtacggttattgttcgttcgttgcgtcgcggtcgtcggtttagttttggttttttagatgttcgttgtagatgcggttggagtacgaggcgtcgtagttattgtttttataataagcgttttatgaatgagtgtaaacgttacgggtttaattacggtggcgttagaggggtggcgcgcgggtttgggcgtttttgcggtcgttcggttgcgtttttagcgttcgtagttttttgttttcgttttggcgcgtgttttaatttcgtgagtatttcgtagtttttgttttagaggtttcgtgggttttttaagatgaggggtttcggggatggttttttttagggttatagggaaaggtcgtggaaatttgttgacgtagatgttttaatatggatattttgtgtaaggggggagggattgacgggaattgttcgcgggttgtagttaatatcgagggtgtagtgcggggggaggcgggggtcgcggttgggggaggggaggcgggaacggcgtagaatgagagagaatattcgtatttggtttaatgcggatttttgttttcgaggtcgggggggatggggtagagagcgtttttttatttttgtacggaaattgaagatagttttgaggtttagagataggagaaacggtatcgagtataggatttcgaggatttaagtttcggttttcgaaggaatgcgtttttatttttatttttaattttagttttaatttagtgtaaagcgtggaagtagatttttattttttaatttttagttttcgggttcgagtaatattagtattgtttttgcgtttggaagtagaaagtggaggatttaaaataagagaatacgataatttattttacgatattgggtattttatttatttatttttttaaagaagatagcgtatttatttatttatttttttcggttatgtgtgggaatattaaggaaattgttaaatttttgagatattagtagataaatattgtgtaaaatttacgtgcgaagatatttgaagggggtgtttgttcggttttgagttgggttttaggggtagggagtgcgaggtgtggttatgtgggtagggtggttagttcgggatgataaggcggggtgtgttttttgcggggaatttaaatttgcgttgagggttggttcggtttcgttaggaagttgtgtttacgggagttcgtagcgggtgattttttagcgcggatttggagggtggaggacgggggttggaaggatagtgtttagttgcgtttgggcggaatatttcgattgttgggattttaggagcggttttacgttttggaatacggggttttggggaggtaaggtgttttagagtgtgttacgttttttaattttttgttttgttgcgtaggatagtcggggttacgttgtcggggtttagttttagcgcgttggttatttttagggcgcgaagacgtatgttttcgtatagtttcggtttttttttttttatttttcgggttcgggggtcggggttcgcggtgggtatttggagaggggcgaggtaggatgaggtcggcgggcggatagttcggggcgcgcggggagtcggatcgtagatttgtttttagtcgtcgcgttcgggagttaggagattttgttatagatagtaatagggaagcggttgtttatagtaatatagcgtcgttagggtcgtttttaggtaacgtcgcgcggtcgggcgcgtcgtcggtttggcgaggttatttttttttttagtttttttgggtcgcggttttttcggttcggtcgcggtcgttttcgtcgtttgatattattcgtcgggttcgggggttgagcggttcgcgcgaggttgtgcgttaatttttatttttagagatttaattcggtaggagcggggagggtaggaggcggggattcgtggaattgggttatttgttatttttgtattttttgttataggtagaggtgaaaatagaattttattattgtatgttattggtttatgttggtgggaatttaggcgttttttttttttatttataaaaagggagggaaacggaaaaatatatataatacgtaaatatagattttttggagttgttttgaattttaaagtaattttgcggttttcggtatttttaattttatttttgattatagaaagaaagagggggacgggagggaaaggggttatgaagttaaatatattttttttattattaatattagttttagataaaataggttaagttttgaatttttgagtttggttatgattgttatttataattagattttaggttatttaataggaaatttgattgggtgcggtggtttatttttgtaatttttgtattttgggagttcgaggcgggtggattatttgaggttaggagttcgagattagtttggttattatggtgaaattttgtttttgttaaaaatataaaatagtcgggtgtggtggcgtacgtttgtagttttagttatttaggaggttgaggtaggagaattgtttgaattcgggaggtagaggtttttgtgagtcgagatcgtgttatcgtattttagtttgggtaatagagtaagattttgtttttaaaagaaaagaaaagaaaatttagaatgatttgatttattttttttttaggtttaaagtatttcggttaatatttaaaagatgtgttaagattttatatttaggatttattttaaatatatttattttgtttttgttaattaaaaaaaaaaaaaagaagaagggtttttgagtgagtttattttttttagatagtttaattttttttttttggtattattatgattagagttggagatttattaaatttattttttggaaaggataaattaagtttattttttggaaaggataaattattatttaataaataattttgtttaattatttatttaataaaattattgattgggttggaggttggtgtttattgtaatgaagagggtaggtttgtttcgatttttagagagattttagttttataggaagattaataagttaatcgagtttatagggtagtagtaagtggtttgaaagaggtaagaaaggggtgttaggtaatatagaagaaggtttggaaataggttttagaggaggtgattgtaatatagagatggggtttagattttttgttttttggataatggaatgataaagattgagtaaggttagagtattatttaggtaaattaagtgtttaattagaagttatagtataggttaatataattttagatttttttttttgttttattaatattcgaatttgtgattattttaatatatttttatattttaatttgtttatggtatttattttaggattgtaaaattatattttaaaaagtggagtttatataaggtagtttaaaaatgaagataaattagaataaatatgtgaaattatttttgttatttgtagatttgtaggttagggtgattttgagataggtgtttgtgtgttttcgtgagtacggcgttgttttttaatagggtagggattttatgttttggataagtttgagtatataaaattaaaatgtgtgtagtttatgattatttatgtgttgagttttttttatttggggatttaaaagtgaaaaggagggtagaattttatatttgaattttaatttaaattgaaaaaaaatttattttttttttatagtgtttttttattcgatagattttttttattttgtattttttttgtggtatttgaaggagatttgattttatatttttgaagttagtgtatattgtttagtttggtgttattgtaatattaagtgaaaggttgttgtttgtatcgtttacgtaaatgttgtcgtatatagtttatttttagtatgtagaagtagttgtttatttggggaagtttggtttagtggtgaagggttgtggttaaagtacgggattagaagttaggaagatgtatatatcgaaattaatttagatttgtttggtaatttttcgtttttgttttgtttatgtgttgatatttatttaggatttagtatagtgtttgaaatatagtaggtgtttaataaatatttttttttttttttttttttttttttttttttgagatagggttttattttgttatttaggttggagtgtagtggtgtgattatagtttattgtagttttgaatttttaggtttaatgtttttattttagttttttaagtagttaggattataggtatatattattatgtttagttaattttttattttttgtagagatggggtttcgttatgttgtttaggttagttttaagtttttggttttaagtgatttttttatttttgttttttaaagtgtcgagattataggcgtgagttattaggtttggtaataaatattttttgaatggatgaatgaatgtatgtttttatttagttaaggtgaatgtagacggttgtgttttttgggtatttagaaagtaaatagataatgttttttaaatttttggaaaggttgaataggtttttttattttgggatatgaataggtaaaaattgggaaagataaaattataagatgtttgggttatttttagttggtatagtttttgtgtataaagaatattttagtggtttatgatgaaagattaaatttatttttgtttttgagttttatgagaaagatagttagtgtttatatataaatattatattgtttgtaatgataatgattatgttattattattttttaatttatttattttaaatgtttggatttaataagagaaagaggtattttataatttttgtgggatttatatatacgtgagtttagtgaagggttttaggaggtcgaggttatttattcgatggtttagatcgtgagtaaaaagattgtttttatttagaatattggaggtataagattattatgttattttttttttatatatatatatatgttattattgtaattaattagtattagagatttagtttttttgagaaaaattgttttttttttttgaataatttttggttttttgataggagaggatg

SEQ ID NO: 51 - DNA, 14147 bp, Artificial Sequence
  chemically treated genomic DNA (Homo sapiens)
gggggtattgagtaatatatttagattaataatattttataagtgtgagtattattgatttaaatttttttgttggttgtgttttgtgtttatgtttgttttatatttattttttttagagttgttttttttagagttttagtaatttttatttttttaaatttttttagttatgggaaggattagtaggtgttagtggatttaaaagaattttagatttgttgagatttttgatttttggtgtttagattaattagtaaatagtttaattaaacggtttgtttttatggttaatataattttgaattggtggttatttagattaagtttattttgtttttgagacggaattttgtttttgtcgtttaggttggagtgtagtggtgcgattttggtttattgtaatttttgttttttgggtttaagggatttttttgttttagttttttaagtagttgggattataggtatttattattattttcgattaatttttgtatttttagtagagatagggttttgttatgttggttaggttggttttaaatttcgattttagatgatttgtttattttagtttttttaagtgttgggattgtaggtgtgagttatcgcgtttagttaaagtttagtttgtataagaaggttttttttgttatgttataggatttttgagtttattaaatagattttaatgttttgagattttacgtatttttttaaaatgaagtatttaaattgttagtgtttgtttttttgtttggtttttttgatgtattgatttggtttgttagtgtgatgaaaaatatggttgagttttattgttttattgtaattagtaggattgtttagaagtttaatttttttaagagatgaagatttgagtttatgtagttggttgttttttaaaaatatttggttatttgggatatattttgaattaattttttggttattttatgtgattaaaagtgttagttttttttgtttttagtatatttttttgtttgggaagtggaagggatgaaatttttatatttttttttgatgatatagaaaggagtatatatttatattttatgaatagatatgtaattatagaagaaatagtttaacggtcgggcgcggtggtttatatttgtaattttagtattttgggaggtcgaggtgggtggattacgaggttaggagtttaagattagtttgtttaagatagtgaaatttcgtttttattaaaaatataaaaaattagtcgggaacggtggtaggcgtttgtaattttagttatttaggaggttgaggtaggagaatcgtttgaattcggagggtggaggttgtagtgagtcgagattacgttattgtattttagtttgggcgatatagtgagattttattttaaaaaaaaaaaaaaaagtataattatatgattatttatattgttttatatattaaattagtagtaatttgttttttatatagtaaataaaaataaattagtagtaataaatatattttttttgtgttatagttagtatttggtgaattttgtattttttttttttttaaagtgttgaatttataggtttttataaggtaagtttatattattaattaattttgtttttttttttgatgttaaaattgttttttaggagttgattaggtttatttttttgttttttaagtattatttttagaatatttttgaaagtatttttgttttttggtaataatatttatattttatttattttttgtttttaaatatatatttagttaattttaggttttttttaatggagtagttatttatttatttaatatacgttgggtgttttttttgtgttatatattgttttggtttttggggatagagtaggaaataaaaaaaaataaaatttgtttttatatagttgatattttagttaggggagataaataataaataaatgaatgatgtagtatgttagatgttgatagtgttatggagaaagtatattatggagattagaagtattatttgtaatggaatagttatgattttaagaagaatggttgattggatgtgaagtgtgagagagaggagtttaggtttttggttgagtaattggagggatggagttgttattatttgagatggagaagttaggggaggagtagatttggaggggaaggttaggaatttagtttggaatttgttaagtatgaggtatttattaaatattgaagtggatttttagaagatgttattaaaattagttaagtttaggagagagttttgggttagaaataaaaatgtgggagatattggtatatatatgggtttatattatttttttttttaatttaatattttattttattgttttttgtttttttaatagtatttagttttatttattttttaaattgatttttatattgatagtataataaaatttatattttttattatattaagattttgtgtgatttaatttttttttattttttggattttgttttaggttattttttttttttatttaatttttaatattttgattttattgttttttaaatagttttttgttgttttttgttttttttgtggaaaaggtttttttattgtttaattattaggtatttttcgatttttttttattttttatttttgagaaaggttttttttgattttttatattaattaggatttttttgggcgagatttgatttaaattggtttagagaaaaggagttaattgattggtttatgtaatttaattttttttttttgttgtaatttttttttggtttttattttatttaaggttaaagttagggtttttattatggttttgtaggttttatatagtttgttttttttattatttttttgattttattttttatattttttttttatttatttttttttagttagagtggtttttttgttgtattttaaatatgttaggtatatttttattttagtgtttttgtgtttgttgttttttgtgtgtggaatatattttttatatagttatattatttaaaatttattgtttttaagtttttatttaaatgttttttcgtgaagttatttttgagttttttttaaaattgtagttttttatttttgtattttttattgttttttatttttaatttttgttattgtagttagaattatttgatatatagtttttattttattggttttttgttatgtttttttttataagaatttgaagtttattaggtcgggagttttgtttgttgtgtttgttgttattttttagtgtttaaaattgtttggtatatagtaggtatttaataatttttgaattagtgaaaattagatggtggtttggtatttttatataggaatgagttaggtggaaattatttaggatataagtagattttgaagtgataaggaagggttattataattatgtggggtttattttgtttttttttgttttttttttttaggtttagtaatagttttattaaggattttatgaatattaaagtttatatttatatgttgttagaggtgagagtagtttattttattattagattttgtgtttagggtggtgatttgaagaaggaagagagcgaaagaagggaaggattatttttttttttaaattggagttaagggagggaggttagagtaagtttgggggcgtaatttagatttagtttttgtttaattttttttgtttttttttttaggggtttagagaattataaggtttgtagaattttttagagaagttttattattgattttttttttttatttttagatattaaagagtttgaatgtttttgagttatatggtttttttttttttttataaattttgttagttgttacgggggtttgtttttagggtataaagttattgagagatttagagatttagtttttttgtggaatttttaaaatgttttagtagttttgtttttagtttgttgtttggtagtatttgttagttgattttatgtattgtttttttttttgttattttggtaatttgggttttttattttatttttttttttatttttttttttagacgttattttttgaattgttatagagaatgggttaatttatggtggaggtttgtttatttttataataattaaagggttttaaggtttacgtttttatatatttaattattttttaggtattttaaattatatttaaattttaatttagttttattttgttttagtttttgtttgtaagtgttttagtttttaatgggtatagatttggatttcgttttttttagtcgggtttttattttaggttgagtttagttatcgttaattaatgtagagttaggttttttttttttttaattttggtcgtagtttaattttgttttttgaaagtatttcgtttttgttatttaatgttttttcgtgtgtttgatagttattttgtttttttattttcgttgtgttttaaattcgtttttatttagttttatggttttgtttaatcgtagagttgttttgttcgtttacgcggagtttagttcgatttattttcgtcggttgttacgtttatttttatataagttttgttttcgttgagtagtatggcgtgcgatatcgtttttttggtgttttggtaggggtttagaagtttttcgttcgttaattagagaaaaatagggttatttattttcgtttttgggggttgttttttattaattttatgtaagttaattagtgtgaggtagattttcgttttttcgatataggtttcgagtttttttagttgtttatagttcgttagtttttgagttaatcggcgtggagtatcgtgaaggtcgaacgcgttttttcgggattttaggggtcgtgagcgttttattatttttttttacgttaattacggtatagttttgtagggaagggttcgttttttaatttttcgaggttttgcggtcgattaatagcgttttggttaattagcgagcggcgggatattgggtttttttttttcgggtttacgtgagttgtagggaaacgtaggggcggtttttaggtgttgtcgtcgttatcgttattattatttttatcgtcgtttcggaatttaggtttggggggcggtggggtcgcgtatggagttttcgtttttcggagttgttaatattgttaacgttatcgttacgttatatataggtgagttttgggtttggagggtggagggtttagttcgtgattttacgtatttttttcgttttcgcgtagaggatgtggtttggtcggtggtttgttggtgttcgatttttcgtcgttattattacggttggtggatttgcgtgtggtattgtttaagtttttcgttttttatagtggatttgatcgtggtttaatttttttttttcgttgtataatggatcggtttgcgtgtttatgtttttttttacgttaatttagggtggattcgtttataggttttttttttatttttatttttattcgttttttatttatttttatttatagggagttagtttgtgatagtgtttagtttttttaatagtaggtgtatttgagtgtttggattttttttagttttaatttttaggagattcgttcgtggttttatttattttattttttttgtatatcgtagcgaattaattcgtggcgtcgtattttttcgtatttttttttaatagtgagtttatttgagtttgtatttttgttttttttagttttttaatgtattagtttatggttttttttaaaattattttttttttttattattattattattattttatagtggattagtttttatgtttggatttacgtttttttagttattagtttattgttttgttttttttttttcgtagattgtcgttttagcgtttggggtttttttttttttaatagtgggttagtttagtgttttatatttttttatttttagtagtttagtttatagttttttttttttttgttttgaattagtttgtgtgatggtttttttttttttttattgtggtgtaggagtttgtaaggttttttgttttttttttttttagacgatgagttttattatttttttttttgtagtggatttgtttattggttttttttttttatatttttgtatgtttgtatagtttttcgtatattttttcgtgagtttagtgttttgtaattgggggaagatcggtcgtgtatttttaatttttttttttttttttttttttttttagaagagaacgtgttgatttttttttttttgtgatggagtattgtacggttttttttgttttttattttttaatagtgggttagtttggttatattcgtaattataaagacgttttgttttattataataagtgaatatattagcgttagtgatgatagtaatgttaataggagttagcgtttattgagtatttgtcgtatattaggtagagtgttttatatgaatgagtttttttaatttttattataattttatgagataggtagtgagggaattgggttatagggaggttaaattttttatttaaaggtggtttaggaagtatttaggatataggataatttttgaggttttttttttagattttattttattttacgtgaggttttagtttttaaaaattaaattagtttttatttttaagtttttgtttttgttgttttttttgtttgtagagtagtttttattttttatttttttttagtatttatttattttttaattttagtagttgtgtgattttagatgagtgatttaattattttttttttgtgtttttttttttatttgtgaaatgggggattagaattagaattttttttagtgtaaataaatattaattgtgaattaatggtaaaataagtaatttttttagtattatcgtttatatttttttatttttttattgtgttttaattatattggttttattatatagttttttaaatatagtaggtatgggttagttttagggtttttgtattggttgttttttgtgttttgaatattatttttagatttttgtatggttttttttagtattttgtttaaatattaatttttaaaggatgtttattatattgtggtgtgtggaatgtagtataaaaagatatatgtatgaaagatgtttttaagaatgttagtttatatatgagtaagggttttttttttttttaaaaggatgtgtttataagattgaggtacgtaatatgttttgtaaaggtataggtataaaagttgtttttaagagtgttagttgtatatgtgaataaggattgtgttgttgtattgaaagaatgtgtttataaaattgtggtgtgtagttgggtataggggtgtgtatttatagttttagttattcgggaggttgaggtgggaggatagtttgagtttaggagttttaggttagtttgggtaatatagcgagatttttttttttgaaaaaaaaaaatttaaaaaataattattgtggtgtgtgtaatatatttttttaaaggtataggcgtaaaagatgtttttaagagtgatttgattttgttgtatttgggtagtgttattttattaaaggttgattgttatattatggtatttagaatatattatataaaggtatatgtataaaaaagaagtttttaataatgttatttgtaaaaataaaaaaagttaatttttttttgattatttgaagttgtatatttagtagggtttaagttaggtttttgatttgtttcgttgttttttattattgtttgatatattgtgtgggttatttgtttgttgtttgtttttttttattagaatgtgagttttatgaggatttagtttttgtttgtttatttatcgttatgtttttagtaattgaaaatgtattaggtaaatagtagatgtttaataagaatttattttatgaataaatgggaaaaagataatttgagatattagtgtaggggttatatgaggaagaagaagggatatgagagttaattagttgggattgtttttgtaattaatttttattgagttttttgtgagtattaggtatttttttaggtgttggaatatggtaaggaacgaaatagggcgaaatatttgtgtttgtggagttgatatttattaaaagttggggaggttgggtacggtggttaatattagtaattttagtattttgggaggttgaggtgggtggattgtttgagtttaggagtttaagattagtttgggtattacggtgaaattttatttttattaaaatataaaaaaattagttgggtgtggcggcgtgcgtttgtaattttagttatttgggaggttgaggtaggagaattgtttgaatttaggaggcggaggttgtagtgagttaagattgtattatgtattttagtatgggtgatagagcgagattttgttttaaaaaaaaaaaaaaaaaaatttaagttggggagatagattatgtgaataaaataaataagtaaaattagtataatagataaatgttgagaagaaataatgaaatagggtaggtaggaatcgagtattgggggtggttgaaattttaggtatagggaaggtgatttttgaattagggttttacggtagagacggagagagttttaatgtttacgggaagagtatattaggtagaaggaagtgttagtttagaggttttgaggtgggatggtgtttgttatgtttaaggaatattaaggcggttagtgtggttggagtagagtgcggggaagggtagaaggtgaggttatataggtgatgggagttagatagtgtaggtgatatataggataggattgtaggggtagggggagaaggatgatatattagttaatagttaatatttgtggagtatttgttatatattagaggtatttttttgtttaaatattaatttttaaaggatgtttattatacggtggtgtttggaatgtattataaaaagatatatgtgttaaagatatttttaagaatgttagtttatatatgaataaggattttttttttttttaaaaggatatgtttataaaattgaggtatgtaatatgttttatggaggtataggtataaaagttgtttttaagagtgttagttgtatatgtgaataaggattgtgttgttgtattgaaagaatgtgtttataaaattgtggtgtatagttgggtatagaggttgaggtgggaggattatttgagtttaggagttttaggttagtttgtgtaatatagtgagattttcgttttcgaaaaaaaatttaaaaaataattattgtggtgtgtataatatatttttttaaaggtataggtataaaagatgtttttaagagtgatttgattttttggtatttgggtagtgttattttagtaaatatttattgttaaatattatggtgtttggaatatattatataaaggtatatgtataaaaaagaagtttttaataatgttatttgtaaaaataaaaaaaaaagttaattttttaagttttttatagaagtattttatagaattgatatagttaatttttatagaagttttggagggtaggtgtatttttgagaatatttgattttgagagtaaaatatttttattttatagatgaggaaataagtaaagagaggttgagtaatttgtttagggtaattttgagttagaatagttagaataggggtagaggaatataaggttgaagatttagaaagaagaatagatttgtaagggtaggtaggttatttggtatttttgattacgtagaggaagaatgaattttttttggaatgcgatgattgtgtaattgagtttatgaagtgagggaagagttttttttgcggggagagtagttcgtgtttatttttagaggttggaattgtttcgggaacggtagatagtttagggtggttgttttagagtttttgtatacgtcgttcgtttcgtttgaaggtttttttttatagagggtagtttggtttgttatttttttttttttaggttaggtgttatttttttggggaagaattttttgtatattttgtgtaaaaatagtatttttgttattttttaggattttatttttttttgtttttttttatggagaattggtggtgtaaggcgattgtttattagagttaaattatttaggttttgaatttcggttttgttaatttttagttgtgtgatttggggtaggttatttttttgtatttttattgttttatgtggaaaatgggggaaatgataatttttattttttaacggtggtttgaggatttaatgagttaaatgatttaaagagtgtgtagtttacggtaaggatcgtatgtttggtttgtatttttaaattattaaaatgtatttatagtatattcgtagatgtttgataggtttttgaaattgattatttttaaaattggtgtgattttttttaaaatttatttttttgtaaggtttttattttagttgattataatgttgtttttgtgggtgattaggttataaatttagatttattttggattttttttttatttttttcgggtatgttatttgttagtaagttttattttgtgtttaggttttttttagattttagttatttttcgttagttttattgttattattattatttatcgtagtggtttttttagttttaatagtttgttttttttataatcgttagggggattttgttgaaattttagttatagtttgttatttttttgtttataatttttttgtggtttttgttttatttaatattttgatagtattcgaaaaagtttggtttagtttggttttcgttattttgtttttttttttcgttgttttttttttttttttcgaatttatgttagttttttttttttatgttatttgttaggtattttttagttttgggttttttatatcggttgtcgtttttatttggtttgttgtttttagatatttacgagtttagtttttttatttttttttggtttttgtttagttgttttttttttggcgattatttttttttgattttttatgtaaaagtaatagtttttttttgtttgattttttttttataatttttattattatttgacgtatttttgtatatgtttgtttttttttttatttgttttttttgttaagatgtgagtttttttggagtagggattgttgtttgttgcgttttcgattgtattcgtagtatttggtttatagtatgtatttattaaatgtttgttaagtgaaggagatggaaagaagtaaatatatttaagtaaggtagattattagaatttttatgaggggttaagtgggagaaataataaaatataaagttttgtgtgttgttgaagttggaagtttatcgttattttttatttagttgataggttttgttgtagttgaaagaagaattggtaaaattgtttgtttttgttattaggagttattttgaattttttggatttttgaaataagtttgtttgtaaaataaatttagtgaggtttttggtgataggattttttaatcggatattttatggttttgtgatttgtataattgaataggaagtttatgtttatttttagtttgtttttaggaaagaaagtagtaatggggtgatagggaggattttgttttttgaaggatatgttgagagggaatagtcggtgtgaggggtcgtttagtttaatggtgaaatgtttagttaattggaatttgattgtttggttttaaatgttggttttgttatatgtggtttgtggaaggtacgtagatatttgtgttttcgttgttttatttataagttaatgataggaagattatttattttttagaggtatgattagggataaataagttaatgtttattaaaaaaaaaaataatagtataggtgtatatgtttttatttaaaatttttggggttagatgtgttttagaatttttatttttttatattttagaaaggtaatatgatgtatatacgatgttatataatattttttagtaagttttgtaatcggttgtgtttatatttttgtagtaaaatgtatgaatattcgtaataagtgagatttaataaagattagaaagggttttgttttattttaaattaggttttgttattaaaagagttaaaagaagttttttgtttttagagtattttggatgttggaatggtagataagggattatgaataaattagaaattaatatttagagtttattatatattttaggtatataatatttaatttgtataatatttttgtgaattaggtattgttatttttattttattaatgggtatattattatttttgttttatatatgagaaaattgaggtataaagaggttaaagaatattagttaagcgtggtgttttatgtttgtaattttagtattttaggaggttagggagagaggattgtttgagtttaggagtttaagaatagtttgggtaatatagtgagattttattttttaaaaaaagaaaaagaatatgtttagggttatatagttaataagtggtagaattaggatttaaatattggtaatttggttttagtgtttgggtagttgtttagtaggttatattgtttttttgtttagaagagtgtttgatgtgtattaagtttttaatagatgttaattattgttgttattaagaaagagaatatttagggtcgagtacggtattttatatttgtaattttagtattttgggaagttaaggtgggaggtgggtggattatttgaggttaggagtttaagattagtttggttaatatggtgaaattatgtttttattaaaaatataaaaattagtcgggcgtggtcgtgggtatttgtaattttagttatgcgggaggttgaggtatgagaatcgtttgaatttgggaggtagaggttgtagtgagttaagattgtgttattatattgcgttttagtttgggtaatagagagagattttattttaaaaaaaaagaaaaaaaaaaaaagaacgagaatatttagggatagtaataggatagagagattaggtatttatttagttttaggacggttttataaaggaaaggatttttgggttgggatttgaaagataagaaagattgttaggcgaaagaaggaagttttacgtggagtgagtagtttttgtaagggtttggtaaaaaaaaaattttttgaaaaatttgatattgatatggtagaagatatagataatatttaaatgaggaggatggaattagttttttatttttgttgtaataaataattataaatttagttgtttaaaataatatatttgttattttatagttttgtaggttagaagttttatattggttttagttgaaattaaggtattggtagggttgcgttttttttggaggttttaggggaaaatttattttttgtttatttaagttgttggtagaatttaattttttgagattgtaggattgaagtttttgtttttttattgtttgttagttgatagttatttttagttttaagaggttgtttatagtttttgattttgagttttttttttttatttttaaagttaataatggtaggttgagttttttttatattttgaattttttttgttttttttgttattatatttttgagttatttttttttttttattatttgttttttagagtttatatgattagattgaattttattaaataatttagaaataatttttttgttttagggtttgtaattttaattttatttgtaaagtttttttttgttatgtagtgtaaataatatataggtttcgaggattaggatgcggagtagggttggtattatttggtttattatagtttgttttttgatttttatagatttatatttgttttatatttaaaatatatttatattattttaagatatttatgagttgtattttattatagggagtattttaagtaagattggggagttagaagttagtttgggaaggtttagggaatgatggtagggtttgaagatagagatggagaaaagatgataaaaaaaggaatttttttttcgttgatttttgttttttttatgtttatagttttttaatttagttgtttgttttttagg

SEQ ID NO: 52 - DNA, 14147 bp, Artificial Sequence
  chemically treated genomic DNA (Homo sapiens)
tttggagagtaaatagttgagttgagaggttgtggatataggaggggtagaggttagcgggaggaggatttttttttttgttattttttttttatttttgtttttaaattttattattattttttaaatttttttagattaatttttagttttttagttttgtttgggatgttttttgtgatgggatataatttatgggtattttaggatggtgtgaatgtattttgaatgtgaaataaatgtgaatttgtgggggttagagggtagattgtggtaggttaaatgatgttaattttgtttcgtattttaattttcggaatttgtatgttatttatattatatagtagaaaggaattttgtagatgaaattaaggttataaattttaagatagggagattatttttggattatttgatgaaatttaatttaattatatgagttttgaaaagtagatgatggagaaagaaaggtagtttagagatgtgatgatagaagaggtaggggagatttaaaatgtgagagggatttaatttgttattgttggttttgaagatggaggaaggaggtttagaattaaggattgtgggtagttttttaaagttgggaatggttgttagttgatagatagtaaggaaatagggattttagttttataattttaaggaattggattttgttaataatttgaatgagtaggaaatggatttttttttagagtttttagaaggaacgtaattttgttaatattttgattttagttgagattagtgtgggatttttgatttatagaattgtaagataataaatgtgttgttttaagtagttaaatttgtgattatttgttatagtaagaatagaaaattagttttattttttttatttgaatattatttgtattttttattatattaatgttaagttttttaggaggttttttttttgttagatttttgtaaaggttgtttattttacgtggggtttttttttttcgtttagtagttttttttattttttaagttttagtttaaaggtttttttttttatgaagtcgttttaaaattgaatgaatgtttgatttttttgttttgttattgtttttgaatgttttcgttttttttttttttttttttttttttgagatggagtttttttttgttgtttaggttggagcgtagtatagtggtataattttgatttattgtaatttttgttttttaggtttaagcgatttttatgttttagtttttcgtatagttgggattataggtatttacgattacgttcggttaatttttgtatttttagtagagatatggttttattatgttggttagattggttttgaatttttgattttaagtgatttatttattttttattttggttttttaaagtgttaggattataggtgtgagatatcgtgttcggttttgaatatttttttttttgatgatagtaataattaatatttattgagagtttaatatatattaggtatttttttaagtagagaggtaatatggtttgttggataattgtttaggtattagggttagattgttagtgtttgaattttggttttgttatttattagttgtgtgattttgggtatattttttttttttttttaagaaatggggttttattatgttgtttaggttgtttttgaatttttgggtttaagtaattttttttttttggttttttaaagtgttaggattataggtatgaggtattacgtttggttgatattttttaatttttttgtattttaatttttttatgtgtaaaatagggataatgatatgtttattagtaaaatggggataataatatttagtttatagagatattgtatagattaaatattatatgtttgaggtgtatgataagttttaaatattagtttttgatttgtttatagttttttatttgttattttaatatttaaaatgttttaagggtagaaagttttttttaatttttttggtggtaaaatttgatttgaaatgaaataaggttttttttggtttttattgaattttatttattgcgagtgtttatatattttgttgtagaaatatgaatatagtcgattatagagtttattaaggggtgttatgtaatatcgtatatgtattatgttatttttttgaaatgtgaagaaatggaaattttgaaatatatttggttttaggggttttgggtaagggtatgtatatttgtattgttatttttttttttaatgggtattgatttatttatttttgattatgtttttgagaagtaggtagtttttttgttattaatttataaatgaggtagcggaggtataaatgtttacgtattttttataggttatatgtggtaaagttagtatttggagttaggtagttaggttttagttgattaagtattttattattaggttaaacggttttttatatcgattatttttttttagtatgttttttaaagaataggattttttttgttattttattattgtttttttttttgagagtaaattggaaataaatatgagttttttgtttaattatataagttataaagttatgaagtgttcgattagagagttttgttattagagattttattgaatttgttttgtaggtaggtttgttttagaagtttaaagagtttagagtgatttttggtggtaaagataggtaattttattagttttttttttagttgtaatagaatttattagttgagtgaaaggtgacggtgggtttttagttttaatagtatatagggttttgtattttgttattttttttatttgattttttataagagttttagtaatttgttttgtttagatatgtttatttttttttattttttttatttagtaagtatttggtgagtgtatattgtgggttaggtgttgcggatatagtcgagaacgtaatagataataatttttgttttagaggagtttatattttagtaggaaaggtagatgagaaaaaaggtaaatatgtataagagtgcgttagatggtggtaagggttatgggaaaaaaattaagtaggggagagttgttatttttatatggagagttaggggagagtagtcgttaaggaggggataattgggtagagattaaaaggaggtgaaggaattgagttcgtgagtatttgagagtagtaagttaggtggaagcggtagtcggtgtgaagggtttaaggttggagagtgtttggtaggtgatatggggagaggaggttgatatgggttcgggggagaggagggaggtagcgggagaggagaatagagtgacgggggttagattgagttaggttttttcgggtgttgttaggatgttgagtgagataggagttataagagggttgtgaatagagggatgataggttgtgattgagattttaataggatttttttggcggttgtgagaagaatagattgttggggttgaagaagttattgcggtagatgatggtggtagtagtggggttggcgagaagtagttggggtttggagaaagtttgaatatagaataggatttgttgatagatagtatgttcgggggaggtgagagaagggtttagggtgagtttaggtttgtggtttaattatttataaagatagtattgtggttagttgaggtgggagttttgtaggagagtaagttttgaggggggttatattagttttggagatggttagttttagaggtttgttagatatttacgggtatgttatgaatatattttaataatttaaaaatgtaagttaggtatacgatttttatcgtgggttgtatattttttgaattatttaatttattgaatttttaaattatcgttaaagggtggggattattattttttttattttttatatgaggtaatggaggtatagagaagtaatttgttttaagttatatagttggaagttggtagagtcggaatttaaaatttaagtggtttggttttagtgagtaatcgttttatattattagttttttatgaagagaaatagagaagggtaagattttagagagtgataggaatgttgtttttatatagggtgtataaggagtttttttttaaggaagtgatatttggtttgaaggaggggaggtagtaagttaggttgttttttgtgggggagggtttttaggcggagcgaacggcgtgtataaaggttttgaggtagttattttgaattatttatcgttttcgagatagttttaatttttgagggtaagtacgggttgtttttttcgtagggagagttttttttttattttatggatttaattatataattatcgtattttaggaagaatttattttttttttgcgtgattaaaggtgttaaataatttgtttgtttttgtaaatttgtttttttttttgagtttttagttttatgtttttttgtttttgttttggttattttggtttaaggttattttgagtaagttatttagtttttttttgtttgtttttttatttgtaaaatggggatattttatttttaaagttaaatatttttaaaagtatatttattttttaaggtttttgtgaggattaattgtgttaattttgtaaaatatttttgtaaaagatttgaggggttgatttttttttttgtttttataagtagtattgttaggaattttttttttatatatgtgtttttgtatagtatattttaagtattatagtgtttaataatgaatatttattgaaataatattatttaggtgttagaaaattaaattatttttagaaatattttttatgtttgtgtttttaggagagtgtattatgtatattatagtggttattttttgggttttttttcggagacggggattttattatgttgtataggttggtttggaatttttgggtttaagtgatttttttattttagtttttgtgtttagttatatattatagttttgtgaatatatttttttaatgtaataatatagtttttatttatatatataattagtatttttagaaatagtttttatatttgtgtttttatagagtatattatatattttagttttgtgaatatatttttttgaaaaggaggaaaatttttatttatatataaattggtatttttagaaatatttttgatatatgtatttttttgtagtgtattttaggtattatcgtgtggtaaatattttttgggggttggtatttgaatagaaaagtgtttttgatgtgtggtagatattttatagatattagttattagttagtgtgttatttttttttttttgtttttgtaattttattttatgtattatttgtattatttggtttttattatttgtgtgattttattttttattttttttcgtattttgttttagttatattggtcgttttgatgttttttgaatatggtaggtattattttattttagggtttttgaattggtatttttttttgtttggtatgtttttttcgtagatattaaggtttttttcgtttttatcgtgaggttttaatttaagagttattttttttatgtttaagattttaattatttttaatattcgatttttatttgttttattttattatttttttttagtatttgtttattatgttaattttatttatttattttgtttatatagtttgtttttttagtttgggtttttttttttttttttttgagatagagtttcgttttgttatttatgttggagtgtatggtgtaattttggtttattgtaattttcgttttttgggtttaagtaatttttttgttttagttttttaagtaattgggattataggcgtacgtcgttatatttagttaatttttttgtattttagtagagatggggttttatcgtgatgtttaggttggttttgaatttttgagtttaggtaatttatttattttagttttttaaagtgttaggattattggtgttagttatcgtgtttagtttttttaatttttaataaatgttagttttataagtataaatatttcgttttgtttcgttttttgttatattttagtatttagaagagtgtttggtatttataaggggtttagtaaaggttggttgtaggaatagttttaattaattagtttttatattttttttttttttttatgtgatttttatattggtgttttaaattattttttttttatttatttatgggataaatttttattgagtatttgttgtttatttggtatatttttagttgttggagatatagcggtgaatgagtagataaaaattgagtttttatgggatttatattttaatgaggagagatagataataaataagtaatttatatagtgtgttagatagtgataaagggtaacgggataaattagggatttggtttgagttttgttgggtgtgtagttttagatggttagggaggggttgattttttttgtttttataagtagtattgttaggaattttttttttatatatgtgtttttgtatagtatattttaagtattatggtgtgataattaatttttaatgaaataatattatttaggtataataaaattaaattatttttagaaatattttttacgtttgtgtttttaagagagtgtattatatatattatagtggttgttttttgggttttttttttttagaaaaagggatttcgttatattgtttaggttggtttggaatttttgggtttaagttatttttttattttagtttttcgagtagttgggattataagtgtatatttttgtgtttagttatatattatagttttgtgaatatatttttttaatgtaataatatagtttttatttatatatataattagtatttttagaaatagtttttatatttatgtttttatagagtatattacgtattttagttttgtgaatatatttttttgaaaaggaggaaaatttttatttatatataaattggtatttttagaaatattttttatatatgtatttttttatattgtattttatatattatagtgtggtaaatattttttgggggttggtatttgaatagagtgttgaaaggaattatgtagagatttgggggtggtgtttaaggtataaagaatagttaatgtaaaggttttgaggttggtttatgtttgttatgtttgaggagttgtgtggtggaattagtgtggttggagtatagtaagggggtgggaaggtataggcggtaatgttagaaaggttatttgttttattattaatttatagttaatatttatttatattggaagggattttagttttgattttttattttataaatgaagaaaaaggtatagagaggaagtggttaaattatttatttaaggttatatagttgttgggattggggggtgggtgggtgttgagagaaggtgaggaatgaagattgttttgtaggtagagggaatagtaagaataaaagtttggaggtgagaattaatttggtttttaaggattgaggttttacgtggggtgggatgagatttaagaggggagttttaaaaattattttgtgttttgagtattttttgggttatttttgagtaaggaatttaatttttttatggtttaatttttttattatttattttatggggttgtggtgaggattaaaggaatttatttatatgaaatattttgtttgatatacggtaggtgtttaataaacgttagtttttattggtattattattattattggcgttaatgtatttatttattgtagtgaggtagaacgtttttgtggttacgagtgtgattaggttgatttattattaagaggtggaggatagggaaggtcgtatagtgttttattataaggaaaagaggattagtacgtttttttttgggaagggaaaaaaaaagagaaggaaattgaaagtatacggtcgatttttttttaattataaagtattggatttacgggagggtatgcgggggattgtgtaagtatataggggtgtgggggaggaaggttaatgaatagatttattgtaaagggaggggtgatgaggtttatcgtttgaggggaaggggagtagaaaattttatagatttttgtattatagtgagaggagagaaaagttattatatagattgatttaaagtagagagggaaaaggttatggattgagttattgaaaatagggagatgtaaagtattaaattaatttattattaaaaaggagagaattttaagcgttagagcgatagtttacgaaaaagaggagatagggtaatggattgatagttaaagggacgtgaatttaaatatgaagattgatttattataaaatggtggtggtggtggtggggggggggggtggttttgaaaaaagttatggattgatgtattgggggattggaggaggtaggaatataaatttaggtagatttattgttaaagagggatgcggaggagtgcggcgttacggattgattcgttacgatgtataggaagggtggaataaataaggttacggacgggttttttgaaagttgaggttaggagaaatttaaatatttagatatatttattattaagggggttgaatattgttataggttagttttttataagtgggggtgggtggggggcgggtgggggtaggggtagggggaaagtttatggacgagtttattttaagttggcgtggggaaaaatataagtacgtagatcgatttattatataacgggagggggaggttaggttacggttagatttattataagggacgaagggtttgagtaatgttatacgtaggtttattagtcgtggtggtggcggcggggagtcgaatattagtaggttatcggttaagttatattttttgcgcgggggcgggaaggatacgtggggttacggattgggttttttattttttaggtttagagtttatttgtgtgtagcgtggcggtggcgttggtaatgttggtagtttcggggggcgggggttttatacgcggttttatcgttttttaggtttgggtttcgaggcggcggtggaggtggtggtggcggtggcggcggtagtatttagaagtcgtttttgcgtttttttatagtttacgtgggttcgaggaggaggagtttaatgtttcgtcgttcgttgattggttaaagcgttattaatcggtcgtaaggtttcgaggggttgggggacgggtttttttttatagagttgtgtcgtgattggcgtaaggggaaatgatggaacgtttacggtttttggagtttcgaggaggcgcgttcggtttttacggtgttttacgtcgattggtttaaggattgacggattgtgagtaattgaaaaggttcggggtttgtgtcgggggggcgggggtttgttttatattgattggtttatatgggattgatggaagatagtttttaaggacgggggtgggtggttttgtttttttttgattggcggacgagggatttttagatttttgttaaaatattaagggggcggtgtcgtacgttatgttgtttagcggaagtagggtttgtatagaaatgggcgtagtagtcggcgggagtgggtcggattgggtttcgcgtaggcgggtagggtagttttacggttagataagattatagagttgggtaaagacgaatttagaatatagcggaggtaggagggtaggatggttgttaggtatacgaaagagtattgagtggtagaaacgaaatgtttttagagggtagggttgaattgcggttagagttaaaaaggggaggaatttggttttgtattgattggcggtggttggatttaatttagaataggggttcgattagggagagcgggatttaggtttgtgtttattggaagttggaatatttataagtaggggttaagataaggtagggttgagttagggtttgggtgtaatttggggtatttggggaatgattgggtgtgtgaaagcgtaaattttagggttttttgattgttgtgggaatgaataaatttttattatgaattggtttattttttatggtaatttaaagggtggcgtttaggaaaaggaatggaagaaagggtgaggtggggggtttaggttgttaagatgatagaagagagggtagtgtataaggttaattggtaaatattgttaggtaataggttggaggtaggattgttggggtattttggaggttttatagagagattggatttttgggttttttagtaattttgtgttttaggaataggttttcgtggtaattagtagggtttatggggaaaaagaagggttatgtgatttaaaggtatttaggttttttaatgtttgaggatggggggaagaagttaatggtgaggtttttttgggaaattttgtaggttttgtagttttttaagtttttgaaaaagaggatagaagagattgaataaagattgggtttgggttacgtttttaggtttgttttgattttttttttttgattttagtttagagggaaagatggttttttttttttttcgtttttttttttttttaggttattattttaaatatagagtttggtagtggggtgagttgtttttatttttagtaatatgtggatatgggttttgatatttatggagtttttggtgaggttgttgttgagtttagagaaaagaaataagaaagggtaaaatgggttttatatgattatgatgatttttttttattattttaagatttatttatattttggatgatttttatttggtttatttttatgtggaaatgttaagttattatttggtttttattgatttaaagattattaaatgtttattgtatgttaggtaattttaggtattgggagatagtagtaaatataataaataaaattttcggtttgatggattttaaatttttgtaaagaaagatataataaaaaattaatggaataaaagttatgtgttagatggttttaattataataataaaaattaaaaatgagagataataaggagtataggagtggggggttgtaattttaaagagggtttagggatggttttacggagaagtatttgagtaaagatttaaagatagtgaattttgagtagtgtggttatatggaggatgtgttttatatataaggggtagtaaatataaaggtattgaggtgggagtgtgtttggtatgtttgaggtgtagtaaagaggttattttggttggagaagaataagtgaagggggaatgtaagaggtgaggttagagaggtaatgagggagataaattgtgtgaagtttataaggttatggtaaggattttggttttgattttaagtgagatgggagttaagggaaggttgtagtagaggaaggaggttgaattatatgaattagttagttgattttttttttttaagttagtttggattagatttcgtttaaaagaattttaattgatataaagggttaaggaaggttttttttaagaatgaagaatgagaaggaatcgaagaatgtttaatggttaagtagtaggaaggttttttttataaaaaggataagaggtaataaagagttgtttgagaagtagtgaggttagagtgttagaaattgagtggggagggaaagtggtttaagataaggtttaagagataggaagaggttagattatatagggttttaatataataaggaatgtggattttattgtgttgttaatgtaggagttagtttgaggggtaaatgaaattaaatattgttggaaaagtagagagtaataagataggatgttaaattggaaaaaaaagtagtatgaatttatgtatatattaatattttttatatttttatttttagtttagaatttttttttgaatttgattagttttaatgatattttttaaaaatttattttagtgtttaataagtgttttatatttaataggttttagattaaatttttgatttttttttttaaatttattttttttttaatttttttattttagataatggtaattttatttttttagttgtttagttaaaaatttgggttttttttttttatattttatatttagttagttattttttttaaaattatgattgttttattgtaggtaatgtttttgatttttatgatatgttttttttatagtattgttaatatttgatatattatattatttatttgtttattgtttgttttttttgattagaatgttagttgtatgagggtagattttgtttttttttgttttttgttttatttttagggattagaatagtgtgtggtatagaggaggtatttaacgtatgttgaatgaataagtgattattttattaaaaggaatttgaggttggttgagtgtatgtttagggataggaaataaatgaagtatgggtgttgttgttagagagtaagaatatttttaagaatattttgggggtaatgtttaaagaatagaagaatgaatttgattagtttttaagggataattttaatattaaaaaagagaataaaattagttaatggtgtaagtttattttatgaaaatttatgagtttaatattttaaaagggagaaaaatatagagtttattaaatgttagttgtaatataaaagggatatgtttattattgttgatttatttttatttgttatgtgagaagtaaattattattgatttagtatgtaaggtagtgtgaatagttatatggttatgtttttttttttttttttgagatggagttttattgtgtcgtttaggttggagtgtagtggcgtgatttcggtttattgtaatttttatttttcgagtttaagcgatttttttgttttagttttttaagtagttgggattataggcgtttgttatcgttttcggttaattttttgtatttttagtagagacggggttttattattttggataggttggttttgaatttttgatttcgtgatttatttatttcggttttttaaagtgttgggattataggtgtgagttatcgcgttcggtcgttaggttgttttttttataattatatgtttatttatgagatgtggatgtgtatttttttttgtgttattaggaaagaatatagagattttattttttttattttttaaataaagaaatatattaagaataggaagaattgatatttttgattatataaaatgattagaaagttagtttaaagtatattttaagtaattaaatatttttaaaggatagttagttatatagatttaaatttttattttttagaaaaattaaatttttagatagttttattaattataataaagtagtaagatttaattatattttttattatattaatagattaggttagtatattaaaaagattaggtaagggggtaggtattgataatttaaatattttattttggggaagtacgtggagttttaaaatattaaaatttatttgataggtttaggaattttgtgatataataaggaaagtttttttatataaattagattttagttgggcgcggtagtttatatttgtaattttagtatttagggaggttgaggtgggtagattatttgaggtcggagtttgagattagtttggttaatatggtaaaattttgtttttattaaaaatataaaaattagtcgggagtggtggtgggtgtttgtagttttagttatttgggaggttgaggtaggagaattttttaagtttaggaggtagaggttgtagtgagttaagatcgtattattgtattttagtttgggcgataagagtaaaatttcgttttaaaaataaagtggatttggtttaaatgattattagtttagaattgtgttgattatgaaagtaggtcgtttaattaaattatttgttaattggtttgaatattaagaattagaaattttagtaggtttgaggtttttttgggtttattagtatttgttagttttttttatggttggaaaggtttgaaaagataaaaattattgaaattttaagggaggtaattttggaaaaaatgaatgtagaatagatataaatataaaatataattaataaagaagtttaaattaatggtatttatatttgtgagatgttgttaatttaagtgtattgtttagtgttttt

SEQ ID NO: 53 - DNA, 9021 bp, Artificial Sequence
  chemically treated genomic DNA (Homo sapiens)
tgtttagtttagggtttgtgaatgtacgaatcgatattttgtatttagttattttggtggggaggtggagaatttttgtgtttagtttagggattgtaaatatattaattagcgttttgttaaaatagattattcggttttattaattagtaggatgtgggtggggttagataaaagaataaaagtaggttgtttgagttagtagtggtaagttgtttgggtttttttttatattgtggaagttttgtttttttttgtaataaattttgttgttgtttattttttgggtttatattgtttttatgagttgtaatatttattacgaaggtttgtagttttattgttgaagttaatgagattacgaatttttcgggaggaatgaataatttgagacgcgttgttttaagagttgtaatatttatcgcgaaggtttgtagttttatttttgagttagcgagattataaatttattagaaggaagaaatttcgaatatatttgaatattagaaggaataaatttcggatacgttatttttaagaattgtaatatttatcgcgagggtttacggttttatttttgaagttagtgagattaagaatttattaatttcggatatattagttattagggaggttgaggtgaggggattatttgaatttaggaagtcgagggtgtagtgagtcgagattatgtcgttatattttagtttgagtgatagagtgagattttgtgttaaaaaaatagaataaaataaaataagaacgttgaataggttgtgtgttaattttgagatggagtttagatttaagaatgattttgaggtttagatttatatttaagaggatgattttagtttggtatttataggttttttaggtattttagatgtattttgttttgaattaagttttttgtttttgaatttgttttttttggtaaatagtattaagggggttagaaatttgggggttgtttttatttttttttttttattatgtatttttaatgggtggttggatttgtggttgtattttcgtgattttttagtttttttttagtgatggttttaggtgggtttttattttgttttttaaatggtttttttgttttgagttttattttatttgtttttagtttatttattgagttattttagagattattttgattttttgtggatatttttttggtggttttttttttttgttagttagaaattgtttttgattgtatgtaataaatgtggttacgttatttaattaaataaaggtttatttttttcgtgatgaaaagtatatagataagtagtttatttttatcgataattattgagggttttttatgatttttatagtaatgaaatgtgtatttatagtataaagatatataattttaaggttttaatataattgggtttaagtatagtattttttgttttagtttttaattgtttaggtgattttattgtgtagttagggttgataaatattgtatttaggtttagtgtttttgatttgtagttgaggtttagagagaattattgaaattgtagttttagttatttgggaggttgaggttggagaattgtttaagtttagcggggtgaggttgtagtgagttaagattgtattatcgtattttagttcgggcgatagagtaatattttatttaaaaaaaaaaaaatttttggtttatttttttgtttattttttaattatagaggtttttaaatatgaatttttatttttaggaaggttgaaatgatatattataagcggtttagttatttgtacgtgtcgttatttgatttaaggtatttatttttttttattatttttgataaagttgaattgtttatatgtgttatatttttttttttttttaattttttttttttttttttttttttttttttttttttttttttttttttttttttttttttttttttttttttttttttttttttttttttttttttttttttttattttttttttttttttttgatagggtttgtttgttttgtttttttaaattttggggtttaagtgtaaaggttttttttatttgatttttttattttattttatttaagttagatattttacgatgatgatgatgattattgttgagataggattttattttgttgtttaggttggagtgtaatggtgcgattataatttattgtagttttaattttttgggtttacgcgatttttttattttagttttttaagtagtttggattataggggtgtattattatgttcggttaattatatgtgttagatttaatttacgttttagggttttaaataattaaggttttattattttgttttaataaatatatttttataaagatttggaaggtaggttgaaatgtggaatttttggattttttttagttttacgtagaagggtagtagtggagagttggttgtttgttcgtttttggtttttttttttttttttatttttgttttttgtggtattgggtagggtttacgtttaaggttagtagtgtatttaataagggatagtttttgtgtggtttgtttaggattttatatataggtttagggttttttgggtaggaaattttaggattcgggtatttaagtggtgttttaaatagtggtttttggtcgggtgtggtggtttatatttgtaattttagtattttgggaggtcgaggttggtagattatttgaggttaggagttcgagattagtttggttaatatggtgaaattttatttttattaaaaatataaaaatttagttaggtatggtgtgtacgtttgtagttttagttattcgggaggttgaggtaggagaattatttgaatttagtaggcggaggttgtagtgagttgagattgtattattgtattttagtttggtgatagagtgagattttatattaaaataaatatataaataaataaaaatagtgatttttaattgggagtgatttggtaacgtttggaattatttttggttattttagtttggtagggagggatagggtattattggtatttagtgagtaggggttagggattttattgaatattttatagtgtataggatagtttttatagtaaagaattgtttggtttaaaatgtttatagtgtttatattcgatgttttgtattaggaagatataaatatttttaaatattatagagttaaattttttatttttgttttagtagagatgatatttttgcggggggagtatttttttggttttaatatatttttttttttatgggagatgatgttagaagagggatagaataggacgattattttacgaaggtattatttaggtattattagatcgttttaaaagaagagtaatttattgttttaaagtagttttttcgtgtttgtgggcggattttttggtaagtttataatgaattgaaatttgtcgaattttttggaatttaaagaaattttagttttgggtaaaggttttttggttagtatttgtattgtttatgtaatcgtttagaatatacgaattatttggagattattattaaatataataggtaaaattgtaaatatgtatattttttagaggatgataaaaaaatgtgaattgtatttttttgatagaggatgtattagagtttgagggtttaaatagcgtaaataataaataagtaaataaatcgatagtagtgtattttaaacgaggttggaatagtttttattgttgttttatattggattttaattaagttttagtattttgttatatttaatattaagtattaggttggacgtggtggtttatgtttgtaattttagtattttgggaggtcgaggtgggtagatggttggtttgagtttaggagtttgaaattagtttgggtaatatggtaaaattttatttgtatttaaaatataaaaattagttaggtgtggtggtatatgtttgtggttttaggtatttgggaggttgaggtaggaggatggtttgaatttaggaggtggaggttgtagtgagttatgatggcgttattgtattttagtttgggtgatagagcgagattttgttttaaaaattaaataaataattttttcgtttcggataaaagtagtttgtattatttttttattttataatatgtttttgaaatattttttttgaaaggtaagttatatttattatttttgttgtatggaggtattataaattattttattattttattttttttgagtgttgtggtttttaggttagataaaaacgtaggtgatgtttagaagttaattagttgtcgtttggttatttgtagggttgtggttttgttaaataggaaaaatataaaaagaatatcgaattttgttaattaaataagaaattttatattaaggattaagaaaattgtaggggaagaaaaggtaagtttcgggattgaggtgtagcgattttttatatttttagaaaattaaaaaataagataaaaaaatgaaaattataaaagtatttattttggggcgttttaattgttgagtaataaatgagacgttgtggttaaatttagttataattaatgatatttttagataaagtgattttagatttttaaagcgtattttgtttatattattttgttaatttcgcgtattgtaatcggcgggttacgttttcgtgaaaagaaggttgttttttttatatttcggggttttggacgtttttcggttgcggggcggggggagttttcggcgtacgcggttttttggtttcgtttttagttattttcggttattcgcgattcgaggttgtcgtagggggcgggttgagcgcgtgcgaggcgattggtttggggttagagtgggcgaggcgcggaggtttggtttataaagtagtcgcggagacggggtgttggtttgcgtcgtagttttttgtagcgtttggggttttcgttgtagttttcggaattaggatttcggcgtggtttagcgagttatggcgacgaaggtcgtgtgcgtgttgaagggcgacggtttagtgtagggtattattaatttcgagtagaaggtaagggttgggacggaggtttgtttgcgaggtcgtttttattcgttcgttttttcgcgtatttttgttaggagcgggtcgttcgttaggtttcggggtcgttttggtttagcgttcggtttcggttcgtgtcgttcggtcggtgttttcgtttttagcggtgcggtgtttaagtgttgagttatcgggcgggttcgggcgcggggcgtgggatcgaggtcgtcgcggggttgggtttgcgcgtggcgggagcgcggggagggattgtcgcgggtcggggaggggcgggggcgggcgtgttgttttttgtggtttttgggtcgtcgtcgcgggtttgtcgtggtgtttggagcggttgtgttcgttttttgtttggtcgtgttttcgtttttgagggtttcgcggatatcgagtggcgtagtgttaggtttagttcggggatggcgattgcgtttgggttcgtttggtgttttcgtattttttttcgtttttcggttttagcgttttaggttagggagttttcgtttttgtatagttttaaggttaggaatggtttttatatttttaaaaggttttggaaaataaaaatacgtaatagagatcgtttgtgtgatattttgtagggaagtttgttggtttttgttttaggttatgattgggttgtaagggtagagaaggtagttttgaatagaggttttttttttttttttaagtttcgggagttagaggtttaattgatttttttggggatttttgagggtagtgattttaattttgggtgtatagttagtttatttgaagattttattaaaaatatattagagtttaattttcgattaattatattaaaatttgttttagtgtagggtgagtattgttgttttttgaaagtttttaaaagtgattttgatgtgtatttacgattgagaattgtcgtttgaggatagtgggtggagtttcgtatttggaaattagaagatttggagtttttattatatcgaattggtatttaataattgttgtcggagtattttttaagttatattttcgtaaagtggttttaaaattgttttgttagtaggtaggttgttaagatggttagagataaatttttgaacgatttttgtaaaatatatagaaatatttttagaatttttattagtaaaattataaaacgtgttgtaaggaaggtgtttgtgataatattgtttttagaattttagtgaagttattaattggtggaaaatttttttttgtattcggtttaaaaattatgagggaatatttattatacgaatgagatttagtttttaaaggggtttatagaaacgtgagaggataggaatagttagtttgtgtaaatgtttgaaatatatgtgagggagataatgagtttagtttttttttttaataggtttttagattttttggaaaaggttttttggtatttgattttattttgttgttttatttgttagatttttttttgtttttttttatttttttttatataatttattagtattagtgttttgttttttagattaagtttcgttttgtcgtttaggttggagtgtagtggcgcgattttagtttattgtaattttcgttttttaggtttaagtaatttttttgttttagtttttcgggtagttgggattataggcgcgcgtcgttacgtttggttaattttttatattttagtagagacggcgttttattatgttggttaggatggtttcgatttgttgacgtcgtgatttattcgtttcggttttttaaagtgttgggattataggcgtgagttatttcgttcggttattagtgttatttttaagacgtttttgaggaattttttttttttggttattgagaatttatgtatgaatttaggttttttattttttttgagtagtttgtatagtttttttttttaagcgtttgatttcgttttgtttggtgttcgttgtatttgagaatgagttttggatagtggagtattttagttttttagatatgtagagataatatattggttattagttatttggtttggtttatttcgtgtttaaaattttggattttttgttagtttttatagattagaattttttacgtattaatttagtttttttagttttttttgaagaatttttggagatttttttatattgagtttttattagtttaggatagtattgttgtagtagtttatatattttttcgttttttaggtttgtgttatttatttaagtttatagtttggtttttgtagggttgtattcgagtatagttatttagatgttttgaatgtattatcggttaaatggaggttttaaagaatttgttgtttttggttttgtgtttttgataatagagtgtttgagggataatttttatatttgagtttttttaaaattaaaggttgtagaagagttatagtatttattgttaaaaagaaaagaatttaaaaaggtagtaattgttaggatattttatttgagtaatgatattttttagtggaaagttatattttaagggttaatgttttttaattgttggtcgtatttgaaaataaattaagttaaaaataagagatattgatatgttgtatgacggtgtggtgtggatgttgtgtttattttagttttgagatttagttgtaatttttttgatttttgtatgtagttacggagtattattatttgttattattatttgaatggttatattgtttgtttttattttggtagagtggaaaggttatttaggttttagtgtttgaaaagattttagaaagtagtagtacgtttggttagattagaattagtttttttttgggggtagtggaatataatattttttgattgttaattaaaaatatttgtgatagtcgggcgtggtggtttacgtttgtaattttagtattttgggaggtcgagacgggtggattacgaggttagtagatggagattattttggttaatacggtgaaatttcgtttttattaaaaatgtaaaaaaattagtcgggtgtggtggtgggcgtttgtagttttagttatttaggaggttgaggtaggagaatggtatgaatttgggaggcggagtttgtagtgagtcgagattatgttattgtattttagtttgggcgatagagcgagattcgttttaaaaaaaaaaagaaaaaaatttatgatggatatttaaaaatatttattgagtggggagtggagagtaggggttttagggtagtttgttggatatttttagggcgattttttttttttttttttttaaagttaagtgagtatgttatatggaaaagggtgtgcgtggagaaaaagtaaggggttttagagtgtaggatgagatatatattttttgggttaaaaaggttgaggtaggagaatggcgtgaattcgggaggcggagtttgtagtgagttgagattatgttattgtattttagtttgggcgatagagcgagatttttgttttaaaataaaaaacgtttatatgtatatgtatatttaatatgtataaatataatttatttaaaagtatttattatataaataggtatttatattatttatttattgtaatagttaaagtttatgaagtatttaatattgatgtgtaggtatttattttgtttgttattttattaggtgttttttatgttatttaattatgaagtttggttatagggtgtttgtgtattgagtgtgggaataagattattattttttttttgaggatataggtttagagtagttaagtagtttgttggaggtttattggttagaaagtggttagtttgggatttggatatagatttttttatttttaagtttggttgttttttattttattgtgaggggtaaaggtaaattagttgttttttttgtttagaaattttttttaattttgtattttttttaaagg

SEQ ID NO: 54 - DNA, 9021 bp, Artificial Sequence
  chemically treated genomic DNA (Homo sapiens)
tttttaagaaaagtgtaaagttggagagagtttttgaataaagaaaatagttgatttatttttattttttatagtgaagtaaaaagtagttagatttgggagtggaaaaatttgtgtttaaattttaggttgattattttttagttagtgaatttttagtaagttgtttaattgttttaggtttgtgtttttaaaagggagatggtaattttgtttttatatttaatgtataagtattttgtggttaggttttatgattaaataatataaaaagtatttaatagagtggtaagtaaagtgagtatttatatattagtgttagatattttataggttttgattattatagtaaataggtaatgtaagtatttatttatgtagtaaatatttttgaataggttatatttgtatatgttgaatatatatgtatatgtaaacgttttttattttgagataagagtttcgttttgtcgtttaggttggagtgtagtggtatgattttagtttattgtaagtttcgtttttcgggtttacgttatttttttgttttagtttttttaatttaaaaggtgtatgttttattttatattttggagttttttgttttttttttacgtatatttttttttatatggtatatttatttgattttaaaaaaaaaaaaagaaaaagtcgttttggaaatgtttaataggttattttgggatttttgttttttattttttatttagtgagtgtttttaagtgtttattataagtttttttttttttttttttgagacgagtttcgttttgtcgtttaggttggagtgtagtgatatgatttcggtttattgtaagtttcgttttttaggtttatgttatttttttgttttagttttttgagtagttgggattataggcgtttattattatattcggttaatttttttgtatttttagtagagacggggttttatcgtgttagttaggatggtttttatttgttgatttcgtgatttattcgtttcggttttttaaagtgttgggattataggcgtaagttattacgttcggttattataggtatttttaattagtagttagaaaatattatattttattgtttttaggagaggattgattttagtttaattagacgtattattgttttttgaaatttttttaagtattgaaatttaggtaatttttttattttattaaaatgaaagtaagtagtatagttatttaggtaatggtgataggtaatggtgtttcgtggttatatatagaaattaaggaagttataattagattttaggattaaaataaatataatatttatattatatcgttatataatatgttagtgttttttgtttttagtttggtttgtttttaaatacggttaatagttaaggggtattaatttttaagatgtgattttttattggaaaatattattgtttaaatgaagtattttggtaattgttgtttttttaaatttttttttttttgataatagatattgtgatttttttataatttttaattttggaaaaatttaaatgtgaaagttgttttttaaatattttgttattaagagtatagggttaaaaatagtaggttttttgaaatttttatttaatcggtaatatatttaggatatttaagtagttgtgttcgggtataattttgtagggattaggttatgaatttaagtgaataatataggtttgggaagcgaaaaaatatatgaattgttatagtagtattgttttgggttaatgaaggtttagtatgaagagatttttaaaaattttttaagagaagttaggaaaattggattaatacgtgaaaaattttgatttgtaaaaattagtaaagagtttaagattttaaatacggaataggttaagttaagtagttgatagttaatgtattatttttgtatatttggaaagttggaatgttttattatttaaggtttatttttaggtataacgggtattaaataaaacgaagttaggcgtttaaaagaaggaattatgtaagttgtttagggaaggtggaaaatttgggtttatgtatggatttttaatggttagggagaagggattttttagaggcgttttaagaatagtattggtggtcgggcggggtggtttacgtttgtaattttagtattttgggaggtcgaggcgggtggattacgacgttaatagatcgagattattttggttaatatggtgaaacgtcgtttttattaaaatataaaaaattagttaggcgtggcggcgcgcgtttgtagttttagttattcgggaggttgaggtaggagaattgtttgaatttgggaggcggaggttgtagtgagttgagatcgcgttattgtattttagtttgggcgatagagcgagatttggtttgaaaaataaaatattagtattggtgaattatgtggggagaagtaaagagggataaaaagaagtttgataaatgaaatagtaaaatggagttaaatgttaaagaattttttttagaaaatttggagatttattaaagaaaaaggttaaatttattattttttttatatatattttagatatttatatagattaattgtttttgtttttttacgtttttgtaaatttttttaaagattgaattttattcgtatagtaaatatttttttatgatttttaagtcgagtgtaagagaaaattttttattagttggtaattttattaaggttttggggatagtgttattataagtattttttttgtaatacgttttgtaattttattgataaaagttttgaaaatatttttgtatattttataagagtcgtttagaagtttgtttttgattattttagtaatttgtttattggtagagtaattttaaagttattttacgaaaatgtggtttaagaaatgtttcgataatagttattaagtgttaattcggtgtaatggaaattttaggttttttaatttttaaatacgaaattttatttattgtttttaaacgatagtttttaatcgtaggtgtatattaaaattatttttggaaatttttaaaaaatagtaatatttattttgtattaggataggttttgatgtaattggtcggaggttgggttttggtgtatttttagtaagatttttaaataagttaattgtgtatttaaagttaagattattgtttttaaaaatttttaaaagggttagttaaatttttggttttcggagtttaggaggaggaaaaggatttttgtttaaggttattttttttgtttttgtagtttaattatgatttagaatagaggttagtaaatttttttgtaaagtgttatataaacggtttttgttgcgtatttttgttttttaaagttttttaaaaatataaaaattatttttagttttagagttgtataaaagcgaagattttttgatttagagcgttgaagtcggaaagcggagagggatgcgaagatattaggcgggtttaggcgtagtcgttattttcgggttgggtttggtattgcgttattcggtgttcgcgggatttttaggaacgagaatacggttaagtaagggacgagtatagtcgttttaggtattacgatagattcgcggcggcggtttaaggattatagagggtagtacgttcgttttcgttttttttcggttcgcggtaattttttttcgcgttttcgttacgcgtaggtttagtttcgcggcggtttcggttttacgtttcgcgttcgggttcgttcggtgatttagtatttgggtatcgtatcgttgggggcgaaggtatcgatcgggcggtacgggtcgggatcgggcgttggattagggcggtttcgaggtttggcgggcgattcgtttttagtaaaggtgcgcggggggacgagcgggtgggagcggtttcgtaaataagttttcgttttagtttttgttttttgttcgaaattgatgatgttttgtattgggtcgtcgttttttagtacgtatacggttttcgtcgttataattcgttaggttacgtcgaggttttggtttcgaggattgtaacggaaattttagacgttgtaggagattacgacgtaaattagtatttcgttttcgcgattattttataggttagattttcgcgtttcgtttattttggttttaaattaatcgtttcgtacgcgtttagttcgttttttgcggtagtttcgggtcgcgagtggtcgggaatgattgggggcggggttaaggggtcgcgtgcgtcggagatttttttcgtttcgtagtcgggaaacgtttagaatttcgaaatgtggagaaaataattttttttttacgggggcgtggttcgtcggttgtagtacgcgaaattggtaaaatgatgtaaatagggtacgttttgaaaatttgaagttattttgtttagaaatgttattagttatgattgagtttggttatagcgttttatttgttatttagtaattgggacgttttaagatggatgtttttgtagtttttatttttttgttttgttttttagttttttgagggtatagaaagtcgttatattttaatttcgggatttattttttttttttttgtaatttttttagtttttagtatagagttttttatttggttggtagaattcggtattttttttatattttttttgtttggtaaggttataattttatagataattaaacggtaattagttggtttttaggtattatttgcgtttttgtttggtttaaaggttataatatttaaggagggtagaatggtgaaataatttatgatgtttttatataataggaatgataaatatgatttattttttaagggaaatattttaaaaatatattgtgaaatgagaaaatagtgtaaattatttttgttcggggcgagggggttgtttgtttgatttttgagatagggtttcgttttgttatttaggttggagtgtagtggcgttattatagtttattgtagtttttattttttgggtttaagttatttttttgttttagttttttaagtatttgggattataggtatgtgttattatatttggttgatttttgtattttgggtatagatggggttttattatgttgtttaggttggttttaaatttttgagtttaagttagttatttatttatttcggttttttaaagtgttgggattatagatatgagttattacgtttagtttagtatttaatattgagtatggtaaaatattgagatttaattgaagtttagtgtgaaataataatagaagttattttagtttcgtttggagtatattattatcgatttatttatttatttattatttacgttatttagatttttagattttaatgtattttttattagagaaatataatttatatttttttattattttttaggaagtatatatatttgtagttttgtttgttgtatttggtagtagtttttagataattcgtatattttaaacggttgtataaatagtgtaaatgttggttaaagggtttttgtttaaggttaaagtttttttgggttttaggaagttcggtagattttagtttattgtaaatttgttaagggattcgtttatagatacgagagagttgttttgggatagtgaattattttttttttgagacggtttaatgatgtttgggtggtgttttcgtaggatggtcgttttgttttgttttttttttggtattattttttatggagaaaagaatgtgttgaagttaagaagatgtttttttcgtaagaatattatttttgttagaataggggtaaggaatttaattttgtgatatttaagagtatttatatttttttaatgtagggtatcgaatgtgggtattatggatattttgggttagatagttttttgttgtggaggttgttttgtatattgtaggatgtttagtagaatttttagtttttatttattagatgttagtaatattttgtttttttttgttaggttgggataattaaaaataattttagacgttgttaaattatttttagttaagaattattgtttttatttatttatgtatttattttgatatggagttttattttgttattaggttggagtgtagtggtgtaattttagtttattgtaattttcgtttgttgggtttaagtgatttttttgttttagtttttcgagtagttgggattataggcgtgtatattatgtttggttaagtttttgtatttttagtagagatggggttttattatgttggttaggttggtttcgaatttttgattttaagtgatttgttagtttcggttttttaaagtgttgggattataggtgtgagttattatattcggttaagaattattgtttagaatattatttgagtattcggattttggaattttttgtttaaagagttttgagtttgtgtataggattttgaataggttatatagggattgttttttgttgagtatattgttagttttgaacgtaggttttgtttagtgttataaggagtaggggtggggaaaggaggaaaggttaggggcgggtaggtagttagttttttattgttatttttttacgtagaattgaaagaagtttaagaattttatattttaatttgttttttaggtttttatgaaggtatatttgttaagataggatgatagagttttggttgtttggaattttggaacgtgggttgaatttggtatatgtaattagtcgggtatggtggtatatttttgtagtttaagttatttgggaggttgaggtaggaggatcgcgtgggtttaggaggttgaggttgtagtgagttgtgatcgtattattgtattttagtttgggtaatagaatgaaattttgttttaataataattattattattatcgtggagtatttaatttaaataaaataaaatagggaaattagatgagagggatttttgtatttgaattttagggtttaaagaagtagaataggtaaattttgttagaaagaagaaaagagagtgagagagaaagagaaagaaagagaaagagagaaagaaaaagaaagagaaagaagaaggaaggagggagggagggaagaaagggaggagggaaggagggaaggaattagagaaagaggagaatgtggtatatgtagatagtttaattttgttaggaatggtgaggaggaatagatgttttaaattagatggcggtacgtgtagatgattaaatcgtttgtaatgtgttattttagtttttttgagagtgaaaatttatgtttggggatttttgtggttaaaaggtgggtaaaaaggtagattagaaatttttttttttttagatggagtgttgttttgtcgttcgggttggagtgcggtggtgtagttttgatttattatagttttatttcgttgggtttaggtaattttttaattttagttttttaagtagttgggattgtagttttaataattttttttagattttagttgtaaattaaaggtattgggtttagatgtagtgtttattaattttggttgtataatagaattatttgggtagttgaaaattaaaataaaaaatattgtgtttaggtttaattatattaaaattttaaaattgtatatttttatattgtaaatatatattttattgttgtaagagttataagaaatttttaatggttatcgatggaagtaggttgtttatttgtgtattttttattacgagaaaaataaatttttatttggttaaatagcgtaattatatttgttatatgtagttaaaagtaatttttaattgatagagaggagaagttattagaggggtgtttatagggagttagaatggtttttggaatagtttagtgggtggattgagagtagatggggtgagatttaaggtagagaggttatttgggagataggataagagtttatttaaggttattattggaagaaagttgggagattacggaaatgtaattataagtttagttatttattagaggtgtatggtgagagagggaaggtaagggtagtttttaggtttttagtttttttggtgttgtttattaaggaaagtaggtttaaggataaagggtttaatttaggatagggtgtatttgaagtgtttgaagaatttataagtgttaggttggaattatttttttggatatgggtttaagttttaggattatttttaagtttggattttattttagaattaatatatagtttatttaacgtttttgttttattttgttttgtttttttgatataagattttattttgttatttaggttggagtgtaacggtatgatttcggtttattgtattttcgattttttggatttaggtgatttttttattttagtttttttagtagttggtgtgttcggaattggtgggtttttggttttattgattttaagaatgaagtcgtggattttcgcggtgagtgttatagtttttaaaggtggcgtgttcggagtttgttttttttgatgtttagatgtgttcggagttttttttttttggtgggtttgtggtttcgttggtttaggagtgaagttgtagattttcgcggtgagtgttatagtttttaaggtagcgcgttttaagttgtttatttttttcggggggttcgtggttttattggttttagtagtgaagttgtagattttcgtggtgagtgttatagtttataaaggtagtgtggatttaaagagtgagtagtagtaagatttattgtaaagaaagataaagtttttatagtatggaaggggatttaagtagtttgttattgttggtttaggtagtttgtttttatttttttatttggttttatttatattttgttgattggtagagtcgagtggtttgttttgatagggcgttgattggtgtgtttataatttttgagttagatataaaggttttttatttttttattagagtagttagatatagagtgtcgattcgtgtatttataaattttgagttagata

SEQ ID NO: 55 - DNA, 8111 bp, Artificial Sequence
  chemically treated genomic DNA (Homo sapiens)
aaatgggtatgttttggggttagatttggaggaatagtagagattggagtgttagaaggtgagtatgtttgggggtgttggggagatgtaatttattagggatagtttagtgttaggggattagattggggtttatgaaggagaggtagaggttgatgggtttaggggtggtgtgggtaggtgagtttttttagatagtgattttgttttgttttttttttagttaggtttttttttttatttttttttttttttttgattggatttttttgggagagttattttttttggttttttttgttttaatttttttattagttggttattattatttattattattttaagttaaatttttagatttatatggggttaggatattggtattggattaaagaggtttttttttttgttttttttttgtttttttaatgttttgttgtaaagatttaggcggggagagagagagagagagagagatagagattgatttatagttagggttagggaattgaggggaattaatttaatttttttttttttaatttattaggtttgtattttgttttttttgtagattagtgttttgttagttatttgggggttaggggatggagtgaaggataagatttttttttattgtagtgaagttatttggagaaatgtgtggaaaatagtaagatttagtgattttttttttattttttttttaattttaggagagattttgtttttttatttatcggtttttagattaattatttatatttatataggcgagagtttttttgaatattggaggtgataggatattaggataaagtataattattgtgttttggtttaattattattttttttgtttggggtcgtcgttggtttttggttgtttttcgtatttttttttatttttattttttttttttttttttttttatttggaatatttttttttttttttttggttttttttgaattgtttttagagttatagattgtggggagtggttattgcgtttttaaggtgaggttttttaagcggggtcgagtttgttttttaattgggagttagtatgatttttgtgtgggttgttttttgttttattgtttttttttttaatttgttaggtgattttgggtttttttgtgttttttttgggttttcggaggattttttggggagatagtttgttttgacgtttttttttttgtagtaagtagtttggggagggaggtgaggataagtgaagttaagttgtttagggggttaagtttatggaagggaagatgttatagagatatatgtggttttgtgattgttgttttgtgttttttttttttttttgaaagtttaggtgattaggtgatttgagtttttaatttggtgataatgtgggtattggttgagtttttaagagtatattgttgtaaatgtcggtgataatatattggggtatgggatttagagttaatttttttaggttatagttaggttatatttttataatgaaggggggaggtgggttatattttttcgttttaatgaaggtagtttaaaaatttttaggttaggttgtaattttagttttatataaaaggaattttgtgtttttatttttttggatttttgggtaaagttttagagggaaatataaataggttgttgtaatatattttgttgggtattattatggaggatagttggtttatgggggtggggggtgtttggggttacggagtgattggtgatggttatttttttttggaatttttttagtttttttttagttttagatttgtttatttgttttttattaagatttgtttttttaggtttgttggtttttttaggggttgaagaaggtcgagttgagaagggatgtaagggagggggttagaatgagtttttagggtttagagtttttattttgttttaagatgtttatagtttgtgtttttggggtgttagaggcgtataaggaggaaagttagtggttttttttttatatttcgtttattagtttagagtatggagtttaggtgaggaggtttgtttgggagggggttttgagttaggaaataaatatttattaattgtataaagattttgtttttgttgttggggagtttgttaagtggtggagataggattagtgtacgaatgatggaaagggagggttggggtgggtgggagttagtttttttttttataagggttttaggatattatatcgatggaattgggggtattggggaggtaatttagtatttttattaaattatagtaatatgtgttgaggatggggttgattaggtaagttttttggagcgttttggttaaattgagggaaattgttgtatttttatttttagtttatgtttttatagaggttatgttagttgtaggttagattttggtaagatttgggtggataattagattgattggttttattttttttataggttttagagttttaattttgttttttggggtagtttggaaatagttaggttagaaattagttaggaatttttttaagttgttttttatatgtaagaatgggatgggggtttttgggagtatttagggaagatgtggagagttggaggaaaagggggtttggaggtaagggaggggattgggggaaggataggggagaagttgtgagtttggagaagtagttaagggattttgagggaatgggggagttgagacgaaatttttatttttatttagaagatgagttatgagtttgggtttgggttgatagaagttttggtttttggtttggtgggagttttgggtagttggtttatagacgttttttagtgttggcgggtaggtttgaattattacgtaggttttggtttttattcgtttttattagttttttggttttagttttttggtaatatttggggttgggggggtagtaggaataagggtttttgtttgtttagttgtttttttttttgggttttgttagattttatagtgtatacgtgggttttaataggttttttttttttttagttattgattaatttcggaattatatagtttttcgtttttagttttataaatttggtgttaaattttttttttttgggaagtatttttggatattttttaaaggattttagttattttagtttgttggttgtcgtttattttgatgtttgtaggttagatgagggttttagatggtatattgttagagggatatattgtggtttttgtgtttagttttgggttttttgtatatgaagtaattttagttttaaatatgtagttgtttgggaggttagaaatagggggtttaggagtaaattttttttattttttttttaaagtttattttttttttagttagagtcggggtgtgtagacggtagttattagggggcgttcggttattatagggaagttgggtgaatggagcgagtagcgttttcgagagtgaggacgtgtgtgtttgtgtgggtgagtgagtgtgtgcgtgtggggttgagggcgttggagcggggagaaggttaggggttattttaggattttaatagatttgtgtgtttttttttttattcgtttttgttcggtttttcgtttttttttgttttttttaatatttttagtaaagagggaacggtttttaggttttgttcgtacgtaattttatttttttgtttttttttcgttaatgtttcgcgggcgcgtgtttttggatagagttttcgggggcggatgggtaatttttaggttgtgaattttggtgggggtcgagttttttttttattgcggcgggttgcgggttaggttttattgagcgttcgtagagttcgggttcgagtcgcgtgtggaagggttgaggttcgtttgttttcgtttttcggggcgggtcgggggcggggtttcggcggggcggagttatgcgttttttttttttttttttaaaagtcggttggtagcggggaggatcgcggaggtttggggtagtcgggtagttcggaggtcgtggcgttgggggttagtattagcgttttgtcgggaggcgtagcggttaggtggatcggttagcggatttatcggttagggcgttcggtgttggaatttgatatttattgattcgggttttattttttttttttttttttaaatatttttttttaaaattgtattgtttttcgttttaatttatttttgtttgttattttttatttgaatcgggtcgacggtttggggagattgttttatttttttaaattattgtggattttggaaattagtagaaagaggaaagaggtagtaagagttttagagagaagtcgaggaagagagagacggggttagagagagcgcgcgggcgtgcgagtagcgaaagcgataggggtaaagtgagtgatttgtttttgggggtgatcgtcggagcgcggcgtgagtttttttttttgggatttcgtagttgattagtcgcgttgacggatagatagatagatatcgtttttagttttagttattatttttttttcggtcggcggcggatagtggacgcggcggcgagtcgcgggtaggggtcggagttcgcgttcggaggcggggtggagggggtcggggttcgcggcgtcgtattgaaatttttcgtttaatttttgggttgttttcgtttcggaggagtcgtggttcgcgcgggggaagtcgagtcgagcggagtcgcgagaagtgttagttcgggtcgggaggagtcgtagtcggaggagggggaggaggaagaagagaaggaagaggagagggggtcgtagtggcgattcggcgttcggaagtcgggtttatggacgggtgaggcggcggtgtgcgtagatagtgttttagtcgcgcgcgttttttaggttttggttcgggtttcgggtcggggaggaagagtagttcgtcgaggcgtcgaggagagcgggtcgttttatagttcgagtcggagagggagcgcgagtcgcgtcggtttcggtcgggttttcgaaattatgaattttttgttgttttgggtgtattggagttttgttttgttgttttatttttattatgttaaggtaagcggtcgtgttttgttggcgtcgcgggtcgttgcgagcgtttttttcggttggggacgtgcgtgcgagcgcgcgcgtgggggtttcgtgttttacgcgggtttatgggtattaggcgtgcggcgtttttttttgtcgttttaggtgtagggggagggggcgcgcgcgttaggtgggagggtattcggagagaggtttatcgtttacgcgggttttgtttatttatcggagttatcgtacgtacgatttgggtcgattagtcgagggcgggagtcggaggaggaggtcgagggggttgggtttgcgttgtcgttgtcggttgaagtttgttttcggtcgttggtttcggacgaattggaagtttgagtagcgggggcgggagttagagattagtgggtagggggtgttcggattttggatcgcgggagggtagagagcgtggagggggtagggcgtaggagggagagggggtttgttgttattgttattcggtttttttagttttcgtcgcgagtttgggaaaagttttggggtggattgttgcggggattttttttttttgttgggttatttgcgtcgcgttaatttcgttcgttttcgttcgcgtttcgttcggtgttcgttttttttcgttcggtcgggtgcgcgcggcgcggagtcgattatattagttcgggtttggtcggtcgcgtgttttcggagtttcggttgttcgaatggggagtttagagtggcgagcggtattttttttttcgttagtttttcgcgggaaggtgatttttcgaggtagttttagttcggggatttagagaattatttttatttttttttattgtttttagattttatttttgtttagtgttaggaggaattttttgacgttttttttttttatttattttttttttagtttggagagaagtttttgttatttcgtttatttttatttttttttgcggagaagatttatttaatttttttttggttttagagtttagggaaaggatgattattgttagaagtcgtggcgcgggagtttattgggcgttttgttatattttatcgaaagtttcgatttggtgatagtgtgttttttttttttcgttaatagtttcgagtgagttgtgttttagttttcgtgggggtgggttaagggaggatttgaagagttattgttttattttatttttttggagaaatggtttgaaatttgttgtgatacgggtagtatgggaatagttttttttgaattttggaaaggagtttttgttagttttgtatatattttgttttggtgaaaggtagttttggagtaggtgtttttttggaattttaaatttgtttatttaatttgtttttgaaagggattttaaagggttttttttcgtttttttttgacgtttttttttagttagaatttttttggagaggaggtaagaggaaagttatggataggggtcgttgttaatatcgtaagttttttagattttggtataaaggttttggttataggtttttaagtagggaggagggggaggagtggttgtttggttatagtgtgatttttagaggtttttagagaaggatatttggtttttgtttgtttagaatcgttttttttgtgttttttggttttggaaggggtatgaaattttcgtttttttttttttttggggtttaggaggagtggagggtttcgggagaatattgttagggggaaggtagggggtgttatgggaatgggtgagggggttgaggtgtagaatttagggggtttttgtaggagtcgtagtggtaagttgtttagttggaagtttggtaattgttgtttttttttgagaggggttttttgtgattttggttgtttttgggagtagggttggggtatttgagtggggtgtatttggggtgtgtgggaaggagagggaaagaaagatggatagtgggatttttttttagtagggtttggtgtttcgtaggttagagtgtttttttgttttgcgagtgttgggcgggaggggagttggtgagagttggagatttttaggaagggttggtagaagtttttttttttgggtgttgttaggttcgtatgttttggcgtgttgatttttatagtttttggcgaggggaggaatgatttgatgcgggtggggagggttagaggaggttttaggtttaaggtggtgtagggggttttttaggggttgggtagtgttaaggtataaaagttttttttggtttttggtggtatttgaaggtgtttaggtgagaggggtttggtatttttttattttgggagggagaagaaattagggaataggtaggagtgggagataggtgaggttttggaaatttattgaggttttggagagatttgtgtagagaggaaaatgtggtttttttttagggtttttttttgggtttttattttttaagtaatttgtgggtatgttgggttatttttaaggattagaagagtttggatgggggagggtggttggtgtttttcggttttcggtattttttttcgtttttaatattagtttattttggtatttgttatgttagtaggagaaggttattatgttgtttttttcgtttttagttttttttttttgttttagtttaaatttgtttttttatttgattttaatatttattatggttttggattagggaattagggggatagtgagagtagggagagggaagtgtggggaaggtataggggatttcgatagtgaagtattttggggttttttttttgtatttcgagttttttagtttttaatatttggttagtttttaattttttcgggtttataattatagtagtttaggagtggtgggtatattttgtgttcgtggggattttcggttgtgttttgttcgatttagaagatttggagaagttagaggttgttggtgggagggaagtgaggagggaggaggggttgggtggttgggtttgtgtattttagtttttgtttatgtttatgttttgttttttttttgtttttagt

SEQ ID NO: 56 - DNA, 8111 bp, Artificial Sequence
  chemically treated genomic DNA (Homo sapiens)
attgaggatagaaagagagtaaggtatgggtatgggtaggggttggggtgtataggtttagttatttagttttttttttttttttattttttttttattaatagtttttggtttttttaagttttttgagtcgaataggatataatcgggggtttttacgggtatagaatatgtttattatttttggattgttatggttatgaattcgaggaagttaaagattaattagatgttgggggttggggagttcgaaatgtaggaggaaaattttagaatgttttattgtcgaggttttttgtattttttttatatttttttttttttgtttttattatttttttagttttttggtttaaagttatggtaagtattaaggttaaataggaggataaatttggattggggtaggaaggaaggattaggggcgagaaaaataatatggtgatttttttttgttgatatgataaatattagggtgagttggtgttggagacggaggggggtgtcgaggatcgaagggtattaattatttttttttatttaagtttttttagtttttaggaataatttagtatgtttataggttgtttagagggtaaaaatttaggaggagattttgggggagaattatatttttttttttatataaatttttttagagttttaatagatttttaaagttttatttgttttttatttttatttgttttttggtttttttttttttttagggtgaggaggtgttaagttttttttatttgggtatttttaaatgttattagggattagggaaggtttttatgttttggtattgtttagtttttagggggttttttgtattattttaggtttgaggttttttttaattttttttattcgtattagattattttttttttcgttagaagttgtgaaggttaatacgttaagatatgcggatttgatagtatttaaaaggaaaggtttttgttagttttttttgggggtttttagtttttattaatttttttttcgtttagtattcgtagagtagaggggtattttagtttacggaatattagattttgttaggggagagttttattgtttattttttttttttttttttttttatatattttaaatgtattttatttaggtattttagttttgtttttagagatagttaaggttataggaagttttttttaagagaaaataatagttattaggtttttagttggatagtttattattgcggtttttgtagggattttttggattttgtattttagtttttttatttatttttatgatattttttgttttttttttgataatattttttcgggattttttattttttttgggttttaaggaggaaaggggacggaaattttatattttttttaaggttagggggtataggaggggcggttttaggtaggtaggggttaggtgtttttttttgggggtttttgaaggttatattgtggttaggtagttattttttttttttttttttatttggaggtttgtagttaaggtttttgtgttagggtttgaggaatttgcggtgttagtagcgatttttgtttatggttttttttttgttttttttttaagggaattttggttgagggaaggcgttagagaggagcggaaagggattttttagagttttttttagaagtaagttgggtgggtaggtttggagttttaaaaaaatatttgttttagggttgttttttattaggataaagtgtgtgtaaggttggtaggagtttttttttagggtttaggaaggattatttttatgttgttcgtgttatagtaaattttaagttatttttttaaaagggtaaagtggggtaatgattttttaaatttttttttgatttatttttacgagagttaaagtatagtttattcggaattgttggcgagggaagggaagtatattgttattaagtcgggattttcggtggaatgtgataaagcgtttagtgggttttcgcgttacgatttttgatagtgattattttttttttggattttggggttagaaaggggttagatggatttttttcgtagagagaaatgaaaataagcggggtgataggggtttttttttaggttaaaaaggaaatgggtgaagagaaggggcgttaggaaattttttttagtattgggtagaggtagggtttggagatagtaggaaggggtagggatggttttttggattttcgggttggggttatttcgagaggttattttttcgcggagggttggcggggggaggggtgtcgttcgttattttgggttttttattcgggtagtcgaggtttcgggaatacgcggtcggttaggttcgggttgatgtaatcggtttcgcgtcgcgcgtattcggtcgggcgggggagggcgggtatcgagcgggacgcgagcggggacgggcggggttggcgcggcgtaggtggtttagtagggagggggggttttcgtagtaatttattttaaaattttttttaaattcgcggcgagggttgaagagatcgagtggtagtgatagtaagtttttttttttttttgcgttttgttttttttacgttttttgttttttcgcggtttaaggttcgagtattttttgtttattggtttttggttttcgttttcgttgtttagatttttagttcgttcgggattagcggtcgggagtaaattttagtcggtagcggtaacgtaagtttagttttttcggttttttttttcggttttcgttttcggttggtcggtttagatcgtacgtgcggtgatttcggtgggtgggtagggttcgcgtgggcggtgagttttttttcgggtatttttttatttagcgcgcgcgttttttttttttgtatttaagacgatagagggggacgtcgtacgtttggtgtttatggattcgcgtggggtacggagtttttacgcgcgcgttcgtacgtacgtttttagtcgggagaggcgttcgtagcggttcgcggcgttagtagggtacgatcgtttattttggtatggtggaggtagagtagtaaggtaaggttttaatgtatttaagatagtagaaagtttatggtttcggaggttcgatcggggtcggcgcggttcgcgtttttttttcggttcgggttgtggggcggttcgtttttttcggcgtttcggcgagttatttttttttttcggttcgaggttcgggttagggtttggggagcgcgcgcggttggagtattgtttgcgtatatcgtcgttttattcgtttatgagttcggttttcgagcgtcgagtcgttattgcggttttttttttttttttttttttttttttttttttttttttttcggttgcggtttttttcggttcgagttagtatttttcgcggtttcgttcggttcggtttttttcgcgcggattacggttttttcgaagcgagaatagtttagaagttggacgaaaagttttagtgcgacgtcgcgagtttcgattttttttatttcgttttcgggcgcgggtttcggtttttgttcgcggttcgtcgtcgcgtttattgttcgtcgtcggtcggggaggaggtggtagttggggttgggggcggtgtttgtttgtttgttcgttagcgcgattggttagttgcgggattttaagggggagggtttacgtcgcgtttcggcggttatttttaaaagtaggttatttattttgtttttgtcgttttcgttgttcgtacgttcgcgcgttttttttgatttcgtttttttttttttcgatttttttttggagtttttgttattttttttttttttttgttggtttttaaaatttatagtgatttggggaagtagagtaatttttttaagtcgtcggttcgatttaagtggggaatggtaagtaaaaataaattaaaacgagaaataatatagttttaaaaaaaaatgtttaagaaaaaagaagagggataaaattcggattaatgaatattaaattttagtatcgagcgttttggtcggtgagttcgttgatcggtttatttaatcgttgcgtttttcgatagagcgttggtgttagtttttagcgttacgattttcgagttattcggttgttttaagttttcgcgatttttttcgttattagtcgatttttaaaaaaaaaaggggggggcgtatggtttcgtttcgtcgggatttcgttttcggttcgtttcggggggcggggataggcgagttttagtttttttatacgcggttcgggttcgggttttgcggacgtttagtgaagtttggttcgtagttcgtcgtaatgaaggggaagttcgatttttattaaggtttatagtttgaaaattatttattcgttttcggaaattttgtttagagatacgcgttcgcggggtattggcgaggagggagtaggaaagtgaggttacgtgcggatagggtttgagagtcgttttttttttgttaggaatattgaagggggtaggggaaggcggagagtcggatagggacgggtggggagagggatatatagatttattggaattttggagtgatttttggtttttttttcgttttaacgtttttaattttatacgtatatatttatttatttatatagatatatacgtttttattttcgaagacgttgttcgttttatttatttagtttttttgtggtggtcgagcgttttttagtgattgtcgtttgtatatttcggttttggttaaagagggaatgggttttggaaagggggtggggggagtttgtttttggattttttatttttgattttttaaatagttatatatttgggattggagttgttttatgtatagagagtttagggttgggtataggggttatagtgtgtttttttgataatgtgttatttggagtttttatttggtttgtagatattaaagtgagcggtagttaataggttggagtgattggggttttttgggaagtgtttagggatgttttttaggggagaagaatttggtattaagtttgtggagttgagaacgggaagttgtgtggtttcggggttagttagtgattgggagggaagaggatttgttggagtttacgtatgtattgtggagtttggtaaaatttaaagggggaggtagttgggtagatagaggtttttgtttttgttgtttttttaattttagatgttgttagggaattgaggttagggggttggtgggggcgggtggaggttagggtttgcgtgatgatttaaatttattcgttagtattaaggaacgtttgtaggttagttgtttagagtttttattaggttaggggttaaggtttttattagtttaagtttagatttatagtttattttttgaatagaaatgggggtttcgttttagtttttttatttttttaggattttttggttatttttttaggtttatagttttttttttattttttttttagtttttttttttatttttaagttttttttttttttaattttttatattttttttaagtgtttttaaaggtttttattttatttttgtatataggaagtagtttggaaaaatttttggttggtttttgatttggttatttttaggttgttttagggaataaagttggggttttgaggtttgtgggaagagtgggattagttagtttgattatttatttagattttgttagggtttggtttatagttggtatagtttttgtggaggtatggattgagaatgggaatgtagtaattttttttaatttaattaaaacgttttagggagtttatttagttagttttatttttagtatatgttgttgtggtttggtggaggtgttaggttatttttttagtatttttagttttatcggtatggtgttttaaggtttttatgaggaaaagggttggtttttatttattttaattttttttttttattattcgtgtattagttttgtttttattatttggtaggttttttagtagtagggataaggtttttgtatagttagtaaatgtttattttttggtttagggtttttttttaggtaggtttttttatttgggttttatgttttaggttgatgaacgggatatggaagggaagttattaatttttttttttgtgcgtttttagtattttaggagtataagttgtagatattttggggtaggatggaggttttgagttttaagggtttattttggtttttttttttgtatttttttttaattcggttttttttagtttttaaaagagttaatagatttgaaagagtaggttttagtaaaaaataaataaataaatttgaagttaagaggaggttggaggggttttaaggagggatagttattattagttatttcgtggttttaggtattttttatttttataagttaattgttttttatggtggtatttagtaaggtgtgttataataatttgtttgtgtttttttttggggttttgtttagggatttaggggagtgagggtatagaattttttttatataaggttaggattataatttggtttaggggtttttgagttatttttattagggcgagaaagtatggtttattttttttttttattgtggagatataatttggttgtgatttggaggggttaattttggattttatgttttagtgtgttgttatcggtatttataataatgtatttttaaggatttagttagtgtttatattgttattaaattaaaagtttaagttatttagttatttgagtttttaaaaaaggggaaaaagtataaaataataattataagattatatgtatttttgtggtatttttttttttatgggtttagttttttgaataatttgattttatttatttttatttttttttttaggttgtttgttgtaggggaaggggcgttagagtagattgtttttttaaagaatttttcgaaggtttagagagggtataaaggggtttagggttatttagtagattgggggaaggggtagtgaagtagagagtagtttatatagaggttatgttggtttttagttgaggggtaaattcggtttcgtttggagggttttattttgggagcgtagtggttattttttatagtttgtggttttgaaggtagtttagaaggagttaaggaggaaggggaaggtgttttaggtgagggggaaggggagaaaggggtgggggtggagaaaagtgcgaaaggtagttaggagttagcggcggttttagataaagaaagtagtgattgggttaaggtataatagttgtattttgttttgatgttttgttatttttaatatttagggaaattttcgtttgtgtgggtgtgggtggttaatttagaagtcggtggatgaagggataaaattttttttgagattggaaagaaggtgaggagagagttattgggttttgttgttttttatatatttttttaagtggttttattgtaatggaaggaggttttgttttttattttattttttgatttttaggtgattagtaggatattgatttgtaggaagggtaggatataaatttggtgaattgaaggagagagaattgggttggttttttttaattttttgattttgattgtgggttaatttttgttttttttttttttttttttttttcgtttaggtttttgtaataaagtattaaaaagataaagagaaagtaaaggaaagggtttttttggtttagtgttaatgttttagttttatgtggatttggaggtttgatttgaggtaatgataagtaatgatggttaattgataaaaagattggagtagaggaagttaaggagggtaatttttttaagaggatttagttaggaaagggggaaggaatggggaagaggatttagttggagagagggtagggtagagttattgtttggggaagtttatttatttatattatttttaggtttattagtttttgttttttttttatgggttttagtttaattttttgatattaagttgtttttgatgaattgtatttttttaatatttttaggtatgtttattttttgatattttaatttttgttatttttttaagtttgattttaaaatatgtttattt

SEQ ID NO: 57 - DNA, 3001 bp, Artificial Sequence
  chemically treated genomic DNA (Homo sapiens)
tatttatggttaggaataaataaaatttagttttttttttaagaaggaggaagtattaaattttaaataagagtaggaatagtatttagaaggagaaatataatattttggaaaaagtaagtagaattaatatagtttatttaaatgtgagatttaaatcgtagtaataggaaatttttttattaaattggaattttttttaatttttgtgtaagatttaaataattaaaatgtattttaatggttattgatggttttattttttttttttttttttttttttttttttttttttttttaaagaaatagatttgagtttttttattggagtagaaatatatgaattttttttaattatttaggaaattggaagtttttgggtggatatggtttttttttattgtttttttttttttatattatttttagttaaaaaaattaattgtttttagtagagggatttttgttagaaatttttattaggtgaatttgtattgggaatttttatgtttttttagtttgtttgtgttttttaaatagagttgaagttgtaaataaagtggaaaaatatattttttattttaaaatttttaaaattttattttttgtggaaaatataattttataatattaatttttaaaatttgtaagagttatagaaggtgtgaaagtagttaaatagtcggtttagaaatttaaaagttaggattaacgggggatagaatgttttttttttaaatttaggtagggatggggagtatttttagtattagggtatttatggacgttataaggggaaaggatgtatttgaacggtgggggtgatttagcgatgaatcgttacgttaatagtattattgttaaatttttaaatttagaggttttggtgaaaaattaaatcggtggtaatttttaacgtttgtagtatttgttattttatattttagtattcggagtttggatagtttcgtaggtcgcgtttcggaggtagtatgagtttttattaatttatttatagttttattgttaacggtagttagatttaggagagatttattgaaaattttttaagatttttttttaaaaataaaacgatttttatatttaatggtttatttgaaagaatatacgtaagaaattaggagatttaaattaaatttattaataggagagtttgatgatgtttaattttagagattagagtttcgattggtgaggtttgatgaaaaagtaaagagaaatcgtaattgtatagttaaaaatataatttttgttatttttaaaattttaaaaattttttatttgtttttgggaaatgggtgaaattgaaaattattaaaataattggattttttaaaaattggattgtatgagtgaaaggtgtttatgagaagtcgatgatttcggattttattatttaagaggatagtatagaatagttaatatgttttttgagggattaggatgttgacgtttttttttgatattcgattattacgtgattgagaaaaaaaaaaaggaagttattttatgaataaaaatcggagcgtaatagtgtaataaaatattttgtatttaaaggtaataggtaggtagatgttgataaagagggttttttaaaaattatgttcggatagatttttgcgaattgtatagataaataggagtagaaggtcggttatttttgtaattagcggtagtagtagtagaagtcgtagttttagaggtagtcggagagatttcggagtagagaaggcgtcgtcgattttcgcggttgtttggttcgcggtttttataaaggcgggttagtcgttcgtttttttttttgttttttttttttttttttttgatttttttttttttttttaatcgtttgttttttttttcgggtggatttacggttattttgttttttcgcgttttattttatcgtttttttttttttttttttgtttttttttttgcgttttttttttttcgtgttacgtttttttttggttttgcgcgtttataaatttttgagtagaatacgagtttcggtaaacgagtttcgtagttttttttgttgttttcgttggtttttgcggtttttgtttagatattaacgttagacggcgatgtttttcgggtggtgattttagcgtaggaatttgaagaagcgttttgttcgtcgttttatttggtagtttttttggtagcgggaggagttgaagggtaagggagggaaaattttattaaagcgatcggtttattcgattgttgattttttcgtttggcgtcgcgttaggggagttagtttttttttagtcgggtttggttagttattgggcgtcgggtagatgtatatatatatatttttttttaattatagtaagtaagaagtggtagggcgcgtatcggttgtcgttaagtgttgtttaatttagggagtcggggtttcgtttcgtttttttttcggtttttagagttttttggggttggagggtgggaggttaggggcgtttttatagttgtgtgtttttttttttattttgcgtagaatgattatgtgtagcggagcgaggttggttttgttggtttatgggataattatgtatagtagcgtttatagtttatttgtcgtcgtcggatttcggtttttcgggattaggtaggtgttggttgtttggtttaagtaggagttggggttttttaggtatagacgtttttttacggttttttttttgtagttttttgggtttagattattagtatcgttttttgcgttttcggtgcgttttcgttagtttcggttggatagcgggtttttattttagtcgagggtttggtaggtttcgcgattgttcggacgttttttttagttttaggtagtttagggtttcgggtagagttagtgagtttttggtcgttggagaatttttttttttttaattcggtttataggatgggggtagggtacggtttttagtttggttttttttatttatttttgggacgagtt

SEQ ID NO: 58 - DNA, 3001 bp, Artificial Sequence
  chemically treated genomic DNA (Homo sapiens)
aattcgttttaagaataggtaaaagaaattaagttaggggtcgtgttttgtttttattttgtgggtcgggttgggggagggggggttttttagcggttagaagtttattggttttattcgggattttgagttgtttagggttgggggaggcgttcgagtagtcgcggagtttgttagattttcggttagaatggggattcgttgtttagtcgaggttggcggaggcgtatcgggggcgtagagggcgatgttagtagtttggatttaaaggattgtaggaaggagatcgtgaggaagcgtttgtgtttggggagttttagtttttgtttgggttaggtagttagtatttatttgatttcggggaatcggagttcggcggcggtaggtgagttgtagacgttgttgtgtatgattattttatagattagtagggttagtttcgtttcgttatatatggttattttgcgtaggatgggaaagaggatatatagttgtgagaacgtttttggttttttattttttaattttaaaaagttttggaagtcgggggagggacggagcgaagtttcggttttttgagttgaatagtatttggcgatagtcggtgcgcgttttgttattttttgtttgttatagttagaaaaaaatatatatatatgtatttattcggcgtttaataattagttagattcggttgaaggaaagttaatttttttgacgcgacgttaagcgaaagaattagtagtcgagtgagtcggtcgttttggtaagatttttttttttttattttttaatttttttcgttgttaggagagttgttaggtaggacggcgggtaaagcgtttttttaagtttttgcgttggagttattattcgagaggtatcgtcgtttggcgttggtgtttgagtagaagtcgtaggaattagcgggagtagtaggaggagttgcgggattcgtttgtcgaggttcgtgttttgtttaaaagtttgtagacgcgtagaattaggagggagcgtgatacggagagaagggggcgtagagagagaggtagaagaaagaaagagggggcgatgaggtgaagcgcggaggagtaaggtggtcgtaagtttattcggaggaagaagtaggcgattaagggaaagagggaaagttagaaaagaaggggaggaaggtaagggagagggcgggcggttagttcgtttttgtaggagtcgcgggttaggtagtcgcgagggtcggcggcgttttttttgtttcgaggttttttcggttgtttttgaagttgcggtttttgttgttgttatcgttggttatagaggtgatcggttttttgtttttatttatttgtgtagttcgtaaaaatttattcgaatatggtttttggagagttttttttgttaatatttgtttgtttgttgtttttaagtatagaatattttgttgtattgttgcgtttcgatttttatttatgaaatgatttttttttttttttttttagttacgtaatgatcgggtattagaaaaagacgttagtattttagttttttaaggaatatattaattattttgtgttgtttttttggatgataagattcggagttatcgattttttataaatattttttatttatataatttaatttttaagaagtttaattgttttgatggtttttaattttatttattttttaaggataggtaaagaatttttagaattttgaggatgataaaagttatgtttttaattatataattacgatttttttttatttttttattaagttttattaatcggagttttggtttttggaattaagtattattaagtttttttattaataaatttaatttagattttttaattttttgcgtatgtttttttagatagattattaaatgtggaagtcgttttgtttttaaagggaagttttggaggatttttagtaaattttttttgagtttggttgtcgttgatagtagggttatgagtagattgatgagagtttatgttgttttcggagcgcggtttgcggagttgtttagatttcgggtgttgaagtgtagggtaatagatgttataaacgttgaaaattgttatcggtttaattttttattagagtttttaaatttgaagatttggtagtagtgttattaacgtggcgatttatcgttaaattatttttatcgtttagatatattttttttttttgtagcgtttataaatgttttaatgttgagaatgttttttatttttgtttggatttgaggaaaaagtattttgtttttcgttagttttggtttttggatttttagatcggttgtttggttatttttatattttttgtggtttttatagattttaaaaattgatgttgtgaaattgtgttttttataagaagtgaaattttaagaattttggggtgagaaatatgtttttttattttgtttataattttagttttgtttgggagatatagatagattgggaaagtatgagggtttttagtataagtttatttgatgaaggtttttaataggaatttttttgttggaaatagttaatttttttaattgaaaatgatgtgggaagaggaaagtaataagggaagattatatttatttagaggtttttaattttttgggtaattgaagaaggtttatatatttttattttagtaagagaatttaggtttatttttttaaaaaaaaaaaaaagaagaagaagaaagaaagaaagaaaatagagttattaataattattagagtgtattttaattatttggattttatataaaaattaggggaaattttagtttagtgggagggttttttgttattacgatttggattttatatttaaataagttatattagttttgtttgttttttttaagatattatatttttttttttaaatgttgtttttgtttttatttgagatttaatatttttttttttttaaaaaaaaaattaagttttgtttatttttggttatgaatg

SEQ ID NO: 59 - DNA, 7001 bp, Artificial Sequence
  chemically treated genomic DNA (Homo sapiens)
tattgttttgttttgttttttagttaataatatattatgagtatatttttattttattaaatatttttttataaagttattttgatggttgtatattattttattttatgaatgtattatattaatttattttttggtgtgggttatttgattttataattttatttttagaataatgaaatatttgtgaagttttagaaaatattggtgtttgggttttaattttatagattttgatttaattggtttgggttatagattaggtattgggaatttaaaaagtttttttagtgattttaatgtgtagttaagatcgggaatttttgtagatagggatgataggaggtgagttatttttagtatttattatttagtattaatattattattttgagttgttaagtgaatgatgtatttgatttattttataaagatatatgtgtaaataaaattattataggatttggtttattagggtttgtgttttaagttttttatgttaagttatatatcgtatattaaatattttaaaatgtattttattgatatatatattaagtgaaaagtgtttttgagttaaataatgatagtataattattaagtaatgataatttgaaatgaatttattattttgtaatttagggataagttatttttttgaattttttgtattttgagagtatttgttatatttgtaagatgaagagtttgaattggttagataatgttttgtgtgtttggtatatgataggtatttaatagttttaaagaattaatgtatttagatgaattgtatattaaatttgttgttttttttttatggttttattaatttaatttgagagaaattaattattttgtaatttagggataagttatgtttttgaatattttgtagtttgaggagaatatttgttatatttgtaaaataaaataagtttgtaagttttttttttttgttttaaagagttttgtgtttttgaatataaaatataaataatcgttatgttgttaattattggtaaatgttttatttttaatttaaggaaatattataaagtaatagatatattaataaaaggttattagttaataggtattgtttgaaaagagtataaaagaattttagtatgattttttatattgtgtttttattattgttaataataaaataattagtaattatgaagtgggtggaattaatttttttaatttttttattaaattttattgaatttagaatattgtatagaaatgaatatggaataggtgagatattttgtgttttttttgttttttttttatattaaaattttttaaattataaaatttgtattaatttgttttgatttattatttatatttattattttatatggagaaaaaatatttaattgatggatatatttaaatgaaagaaaaatttgtaattttataagaggtttataaagttatagtagtgtttaatggatgaatggtttgtatgttttatgttgaattaatttttatattttaatggtatgtatattaattttgaaaaattatatatatatatatatatgtatatatatatgaatataaataaaattttatatgtgaagaagttagaattatgtttttttatataatttttttagattagtaaaatagataaaatttttgtttttaatatagaaaaatgggttattatttgatggtttgaagaagaaatattgtgattgggatatgaatggtaaatcgtagtataattatgtttaaaagaatgtttgaaatatatttttaattatttgatttttaggatagttatagtattatagtatagggaaaaattaaataattggaagataaaatttggattttagtgataggtttattataaattatgtttgttaattttattttttagttttttagtttttttttttttaagtataaaattaagatgtttaggttatttttaatgtttttttaattttgaaattgtatagttttaattgaaatataaatatttatatgtaataatgattatttttttggttgtagttgaaaatacgttttatgaagtttattttgttttttagtttttatattggatttttattaatgtattgtagagataagtttagttgatttgtaagttttgtttatataaatgtattttaaatgtgtaaagtaaggataagtaaatatttaaataaaattgggtatttttgtgagtttttaaaagtataaaagtaatttggataattttaagaaaagttatttatattgaatattaatttgatgttgaagaggttaaattgttgattaatgttttcgatattgattttttgattttttgaaattttatgagttaaattaaattagattttagaaattgaagattagtgtttgattagtgataattatatattaatttaggaattttttttattagtattaatagggtgatattataatgtttttttttttgtatattatttaaattttagtagtaaattataggtgataaaatattttatttgttgttatttgtggagagtatgttagttttttggatgtttttttattttatattttaaaaatttttaataaagaatttaaagtagtgtgttgttgttattttttgtatatttaaatttgtataaggattgttttgagttaatttatgagtattgtagttttgggttttagattttgattatattgggaatagatattgttagaggtttgtttaattattaatttttttttgtttaaatttaaaagtaattataaagaatatagatatttttaattatgggtatattatagtagatggatggttatagaaggagaaattatttttatgggaaatttatttattttagtttttaatatttatatgtatatttatggtaaaagaaaataagaaaaagattaaagtttttttttagatgatttggaagttaattttatataattttataaattaaatgtttaaatagattataatataaatagaaaataaaataaataaatgaaaaattatatttgagaaaaataagtttgttgtaggtttgttttttaaggatttatacgtatttttgttttagggttattatattttttgtttagtttgtttaagaagttatttataaggaagtaagtaaaatggtgaaagatgtattgattgtaattgagaaatttattggagatgaatagtttttagggtgtttagaaaattaggtgagtgaataattttaaaaaagtattgtgatatttgataaaaatttagtatgttgaagagaagatataaaaatagtagtgaaaaatgtatttaaatatttgaagagttattgtatgaaagagggattagatttattttgaattgttaaagagggtagaagagaataataggtagttattataaagagattatataaatatgatgaattaaggttttgaaataagattattttgatgattatgggtatattaatttttttgagttttagtttttttatttgtaaaataagggatgataatagtttttattttatagttagtatggaaattgatataatagtaatagtagttaatttttattatatatataatgtgattggtattattttagggagtataatgtgtatattgataataaaaatattttatgatataggggatagatagtattgatgaattagaatggttgtttagtgagttaagagatgttggttcgggtttttgggtaggatattagttttgtttatttatatttatttattaaatatttaaaataatttttgaagatagatgttaattttttaattgaggaagttgaggtttagagaatttaagtaatttttttatgggaattattaaatggtagagttaggatttgaattagattatttggtttaaaattgatagttttagtagttttattatattataattatagtgaatgtaagatgtatagtatatcgttagggttgttaggtttagtaaataataataaaatataatatttagtttaatttgaattttagataaatattaaatattttttttagtataaggatattttattgtagaagtttaataaataatatttattatttattttattttaatatagaaataaatttgataatgattagaattttttaattataaaataatatgtttagagaatattttgttatggtggggttaattaggtggttgaaagataatgtatttggaatattatagaagagatgtttttttaaggatatagtttaagttttttttaattttgaaatttatgaattgataaaaatttttgttttgtatttttatttttgttttgttttgataatttttttaaaatgtgtataaaaaaataagaatatattatttattgtaattttataattaattagaggtttaaggtaatgttatagatcgttgatttatttttgtaaatttaaaggtatgttttttaaatgaggattgggaattagaaattttacgtaagttttttaggattttttaaatattattgtagtagttataaaagttatataaaagtttttttagatatatgaaatatatgtattttttagatgttttttgtggaatattgatgttgttatttgagtttggtaagggtaagttatagaggaggaaatatatatattttaaaatattttagttaaatatgtaattgtggttaagaaaagtgtttttttaaaaaataattattttattttaaaattatttttatttataattgaaaataatatgtagttttttattgttttgtaaggatggtatgtaaaatgagtatttatgtttgaaatgtggtatgtttgtgtgtgtgtgtgtatatgtatatatgtatgtatatattataatatatatatatgtatttgtaattttaaaagttatatttttaatgagaattatgaaaatattattttgtttagtttttttttttatttaaatttaaatttaaagttttggtgtatacgggtaggatgagtaggtttgttatataggtaaatacgtggtatggtggtttgttgtatttattaatttgttgtttgggtattaagtttagcgtgtattatttattttttttaatgttttttttttttgtattttattttttgataggttttagtgtgtgttgtttttttttttgtgtttatgaaatatggtttatatatttataaaagtttatatattttagtttaaatttttgataatataaaaaggaaaaataaaataatttaaaattgggaaagagaaataaaagattgtatggtttttttttttttattgtttggatattaaagttttattttttataaggtagtaaagaaatttattttattaggttgaaataaaatatattagaatttgtatggaaaattttttagaatttatagttttgattttagatattagaaaatgttttatgtgttttatagatttttaaagtaaagttagttgtttttttttaaatataaaatattttttatagttatttgtttttttggaagaattttgttatgagaaagaaattttggagaagtacggatatttagattgttgtagttaaagtgaagagggaagatataattgtttttttgtatataaaaagtttattttagtatcgattttatttttttaagttttagaatttgttataagttgtgaagtatatgaagaagatagggagatatttatgaataagtaaggatttagtttaaaggtagatgtaaattttagaaatatagtaatggtaagtttaatttagtatttttgtaatgtatttatgtatttttagtaagaggtataatgtttttttggtgttgtgtttgttgaggttttaggtaaggtaattaggagagtaatatttaatgtaatttggtttttatagtacgttagatgtagtataaattataggataaatttattagaggttttattagttttttgagagatatatattttttttttttttttttatttattttatttttaattttattttgtttaagaatatattagtattgtattaaattgatgttttttagagttatatattggtgttttgtgtttatttaattgtttagaaataaaagttagagatttaagtatggttaagtatggttaagatatatagatatggtaaaggtttattgaatatttaggatgttgtggggtcgggcgcggtggtttacgtttgtaattttagtattttgggaggtcgaggcgggcggattacgaggttaggagatcgagattattttggttaatatggtgaaatttcgtttttattaaaaatataaaaaaaattagtcgggcgtgatggtgggcgtttgtagttttagttattcgggaggttgaggtaggagaatggcgtgaattttggaggcggagtttgtagtgagtcgagattgcgttattgtattttcgtttgggttatagagcgagatttcgttttaaaaaaaaaaaaaaaaaaaaaggatgttgtggaaatatgtttgtttgtatagaggattagattaatatttataaataaattttgaagttttttttttttttttttttttatttttttttttttttttattttgttgataggaaattgaaggttggaaggttaaaataattggttaagggtatatagttagtatatttgattttaggtttttttgttggagaagtttgtacgtaattttttaattatttttgttttttatgttattttttaaattagataaatagagagattgtttttagaatatttttgttatggcgattatttaggtgtataattttattttgtattgataagggataaaatgtttatttttttgttgtatttagtagaagtttggttttgttgatttttgaaatatatttgagtaggtttattgaaaaagattttttaataagaattatggttagtatgtttgtttattttttttttataatagaatttggtattatttgttagata

SEQ ID NO: 60 - DNA, 7001 bp, Artificial Sequence
  chemically treated genomic DNA (Homo sapiens)
tatttgatagatggtattagattttattatgagaagaaaataggtagatatgttaattatgatttttattaaaaggttttttttaataagtttatttagatatgttttagggattagtaaagttagatttttgttaagtgtaatagaaagatggatattttattttttgttagtgtagaatggggttatgtatttggatagtcgttatagtagagatgttttaagggtaatttttttatttatttggtttaggaagtaatatggaaggtagaagtgattgaagagttacgtataggtttttttaatagaagaatttggggttaaatgtattagttgtgtgtttttagttagttgttttagttttttaatttttaattttttattaataaaatgggggaaagaagaagaatgaagaggaagaggagaaggaggttttaaagtttgtttgtgagtgttaatttgattttttgtgtaagtagatatgtttttataatattttttttttttttttttttttttgagacggagtttcgttttgtggtttaggcgggagtgtagtggcgtaatttcggtttattgtaagtttcgtttttagggtttacgttatttttttgttttagtttttcgagtagttgggattataggcgtttattattacgttcggttaattttttttgtatttttagtagagacggggttttattatgttagttaggatggtttcgattttttgatttcgtgattcgttcgtttcggttttttaaagtgttgggattataagcgtgagttatcgcgttcggttttataatattttaagtgtttagtaaatttttgttatgtttgtgtattttgattatgtttgattatgtttggatttttaatttttatttttaggtaattaggtgaatataaaatattaatatatggttttggaaagtattaatttggtgtaatattaatatatttttgaataaggtaaaattgagagtagaatgggtaaaaagaaaaaaaaaaggtgtatattttttaagggattaatggaatttttggtaggtttgttttgtggtttgtattatatttagcgtgttatggaaattaagttatattgaatgttgtttttttaattattttgtttgggattttagtagatataatattaaagaaatattatattttttattgggagtatatgagtatattgtaaaaatattaaattaggtttgttattgttgtgtttttgaggtttgtatttatttttaaattggatttttatttgtttatgaatgtttttttgttttttttatatgttttatagtttgtgataggttttggaatttggaaaagtgggatcgatgttggagtgggttttttgtgtgtaagaaaatagttatgttttttttttttattttggttgtagtagtttgaatgttcgtatttttttaaaattttttttttatggtaaagtttttttagaaaggtaggtagttataagaaatattttatgtttggagaaagataattaattttgttttaaaaatttataagatatatgaaatattttttaatgtttaaaattagaattatagattttgaaaaattttttatataaattttaatgtattttgttttagtttgatgaaatagatttttttgttgttttatggaaaatgagattttaatgtttaaataataaaaggaaaaaagttatgtaattttttgttttttttttttaattttgaattattttattttttttttttgtgttattaaaaatttggattaggatatataaatttttataaatatataaattatgttttatggatatagggagggaaatagtatatattggggtttgttagggagtggagtgtagggagggagagtattaggaaaaataggtaatgtacgttgggtttaatatttaggtaataggttggtaggtgtagtaaattattatgttacgtgtttatttatgtaatagatttgtttattttgttcgtgtatattagaattttaaatttaaatttaaataaaaaaagaaattgagtaaaataatatttttatgatttttattaaagatgtaatttttggaattgtaaatatatatgtatatattatggtatatatatatatatatatatatatatatatatatatagatatattatattttagatataaatgtttattttatatgttatttttataagataataaaaaattgtatattatttttaattataaataaaaatgattttgaaatgaaataattattttttaaaaaaatattttttttggttataattatatatttagttaaaatgttttaaaatgtatgtgtttttttttttgtgatttatttttattaaatttagatgatagtattaatattttatagaaagtatttgaggaatatatgtgttttatgtatttgagggaatttttatgtagtttttatagttgttatagtaatatttagagaattttggaaggtttacgtaagatttttaatttttaatttttatttaaaagatatatttttgaatttataagaataaattagcgatttgtaatattattttgaatttttaattggttgtaaagttgtaatagataatgtatttttgtttttttatatatattttgaaaagattattagaataagataaaaatagagatgtaaaatagaaatttttgttaatttataaattttaaagttggaaagaatttaaattatatttttaaaggagtattttttttatgatattttaggtatattgttttttagttatttaattaattttattataatagagtattttttgggtatgttgttttataattggagagttttaattattattaagtttgtttttatgttgagataaaataaataataaatattatttgttgagtttttataatgaaatatttttatattaagaaaagtatttagtgtttatttaaaatttagattgaattgggtattatgttttgttgttgtttgttaaatttggtaattttaacgatgtgttatgtattttatatttattatagttatagtgtaatgaagttattaagattgttaattttaagttagatggtttagtttaaattttggttttgttatttggtggtttttataagaaagttatttaaattttttgagttttagtttttttagttggaagattagtatttatttttaaggattattttaaatgtttaataaataaatataggtaagtaaagttgatattttgtttagaagttcgagttagtattttttgatttattggataattattttgatttattagtgttatttattttttatgttataaaatatttttattattaatatatatattatgttttttagaataatgttagttatattgtgtgtataataaaagttagttattattgttgttatattaatttttatgttaattatgaaatgggagttattattattttttattttatagataagaaaattgaagtttaaaaaagttaatatgtttatagttattaagataattttattttagaattttagtttattatatttatatggtttttttataataattatttattgtttttttttgttttttttagtaatttagaatgaatttaattttttttttatataatagttttttaaatatttaaatgtattttttattgttatttttgtattttttttttagtatgttaaatttttgttaaatattataatgtttttttaaaattatttatttatttggttttttaaatattttgaagattgtttatttttagtgggttttttaattgtagttaatgtattttttattattttgtttatttttttgtaagtggttttttgaataaattgggtaaaaaatatggtagttttgaaataaaaatacgtgtgaatttttaaggaatagatttgtagtaagtttattttttttaagtatagttttttatttgtttgttttgttttttatttatgttgtaatttgtttagatatttgatttgtaaaattatgtaaaattagtttttaggttatttgagaagaaattttagttttttttttgtttttttttgttataaatatatatatagatgttaaaggttaaaataagtggattttttataagagtggtttttttttttgtgattatttatttattgtaatgtatttataattgagggtatttatattttttatggttatttttaaatttaagtaaaaaaaaattggtaattagatagatttttaatagtgtttatttttagtatgattaaggtttaaaatttaagattatagtgtttatggattgatttaaagtaatttttatgtaggtttggatgtgtaaggagtaatagtaatatattattttaaattttttgttagaaatttttaaaatgtggaatggaaagatatttaagagattaatatattttttataaataatagtaaatagaatattttattatttatggtttgttgttaagatttaaatagtatatagaaaagaaaatattataatattattttgttggtattgatgagaaaaatttttgaattagtatatggttgttattgattagatattaatttttagtttttaaaatttgatttggtttgatttatgagattttaaggaattaaaaggttaatgtcgaagatattagttaatagtttaatttttttaatattaagttgatatttagtatgagtaattttttttgaaattgtttaaattgtttttgtgtttttaagagtttataggggtatttaattttatttaagtatttatttatttttgttttatatatttaaagtatatttatataagtaaaatttataggttagttaaatttatttttgtagtatattggtaagaatttaatatggaagttggaaggtaaaataaattttatgaaacgtgtttttaattgtaattaagaaagtaattattgttatatatgaatgtttgtgttttagttagaattgtatagttttagaattaaaagaatattagggataatttaagtattttaattttatatttgaggaaaagaaaattaggaaattaaggaatgaagttaataagtataatttatagtagatttattattaaaatttagattttgttttttagttgtttggtttttttttgtattgtagtgttgtaattgttttgaaagttaaatggttaaaaatatattttaggtatttttttgaatatagttgtattacggtttgttatttatattttagttataatattttttttttagattattaaataatgatttatttttttgtattaaaaataaagattttatttattttattagtttgagggagttatgtgaaggagtataattttggtttttttatatataaaattttatttatatttatatatatgtatatatatgtgtatatatataattttttaaagttaatatgtatattattgaagtgtaaaaattaatttaatatgaaatatataaattatttatttattaaatattgttataattttgtaaattttttgtaaagttataagttttttttttatttaaatatatttattagttaaatattttttttttatgtggaataataaatatgaataataaattaagataaattaatgtaaattttataatttaaaaaattttgatatagagaaaagataagaaaaatataaaatattttatttattttatatttatttttatgtagtgttttggatttagtaaaatttagtaggaaaattaaaaaaattgattttatttattttatggttgttagttattttgttattggtagtggtggaagtataatatggaaaattatgttgaaatttttttatattttttttaggtaatgtttgttaattagtaattttttgttggtatatttgttattttatggtatttttttaggttgaaaatgggatatttgttaataattaatagtatagcggttatttgtattttatgtttaaggatatagagttttttggggtagaaaaaaaaaatttgtaaatttattttattttgtaaatataataaatattttttttaaattatagaatatttaaagatatgatttgtttttaagttgtagaataattaattttttttaaattaagttaatgaagttataaagaaaagatagtagatttggtatgtaatttatttaaatatattaattttttaaaattattaaatgtttattatatgttaggtatataagatattgtttgattaatttagattttttattttgtaaatataataaatatttttaaagtataaaaaatttagagagatgatttgtttttaagttgtagaataataaatttattttaaattattattgtttgataattatgttgttattgtttagtttagaaatattttttatttaatatgtatgttaataaggtatattttaaagtatttagtatgcgatgtatggtttaatatagaaaatttagagtataagttttaataaattaagttttataataattttatttgtatatgtgtttttataaagtgggttaggtgtattatttatttagtaatttaagatgatgatgttaatattaaatgatggatgttaagagtggtttattttttattatttttgtttataagggttttcgattttggttatatattagaattattgggggaattttttgaatttttaatgtttagtttgtaatttagattagttaaattagaatttgtggagttgagatttaggtattagtattttttaaagttttataggtgttttattattttaaaggtaagattataaaattaaataatttatattaggaaataaattaatatggtatatttataaagtagggtgatatatagttattaaaataattttgtggaagaatatttaatgaaatggaaatatgtttataatatattgttaattgaaaaataggataaaataata

SEQ ID NO: 61 - DNA, 2001 bp, Artificial Sequence
  chemically treated genomic DNA (Homo sapiens)
agtttttgaataaaaataaatattgttaaattgtttttaaggaaggttttttaatttatttttttattagtaatataggagagcgtgtggtttatattaataaaaagaattttgttgttttgagtagtattaagcggagcgtttaaatttatatttttttgattaggaaggttgatattcgtttttgtaatttatattttttttttattgaattgtttgtttttattttttgttcgtttttttatagggatattattttatttttttagtgttgtttttataaaataaataatttttttgtttgttttttttttcgagacggaattttgtttagttgtttaggttggagtgtagtggcgcgatttcggttttttgtaatttcggtttttcgggtttaagcgatttttttgttttagttttttaagtagttgggattataggtacgcgttattattatgttcggttaatttttgtatttttagtagagacggggttttattatgttggttaggttgatttcgaatttttgattttaggtgattcgttcgtttcggttttttaaagtgttgggattataggcgtgagttattgtattcggtttaataaatgttttagaaagttatttggatgatagtttatgattgttgaatatcggttgaggtttataaaattgcgtttatcgtttggggattttttagtcggtttttattttttatggaaagcggtttttttataaatttttacggtgggaattattgtaaaggtatcggttttttcggtttcgaatatttcgcgggattttagttgtttttgggtattttttttagcgtaattattaattttaatatgtaacgcgtttcgtggtttaagtattcgaatgaaggttcggggttaaagttatgtgtttgattgcgttatacgtttcgttattttttttacgtttttttttttagcgtatattttggtcgttattttgtgcgcgaggttatggaatttttgagtttcgttaattttatggtcgagcgttttagggatcggttaatcgtaatttagatttcgtaggaaagtttcgtttttattcgtatggaggcgggaattgttacgaagtttttgtggagggagaggaagtagttgcggaaagttaataagagtggggaatcgatgacgttaattaatggggacgcggggatattacggttaatgagaatggagaaggtttaggatacgtgggtgggggaagttgagggttgagattaagggttaaagttgggaggtgagtttgttattttgagtcgggcgagcgttgtgggttaagtaggggttgtagggtagtaggagtgtaggtgatttggggtcgggagttagtaataggtagggttgtgggttgcgtagtgtggaggggtatttttttttagtgttgggagaggttatggtaatttagatatggttttattaatgaatgttaattattaacggtaatgaacgattgattgtttcggttggggcgggtcggggattgttgtgtaagatgggtaggattttgcgcgatatttgtttagtattcgtttttagttttttcgagagattattttttttcgtaatattttttttttggggtttgggtatatttttttgattttcgatttttatgattttgttttgaagatttattgttttgtttttttgatttttaatgttttttttagttggggtacggtgtaaggaagagcgtggtttagggaggacggacgggggtgaaggggacgattaaaggtcgttattataagtaaataattagggttttagtgggattattattattattttttttttttttgtagattgaaaaaatgtagatcgtcggggtattatttatttttttagttttggtaaggtgtcgcgtcgcggtgttttgtagtattaggtgtatggtgtggacgttattagtgtttaatgaatgaatttaggggagtttggcgttttgatgatgtaggttttttg

SEQ ID NO: 62 - DNA, 2001 bp, Artificial Sequence
  chemically treated genomic DNA (Homo sapiens)
taaagagtttatattattaggacgttaagtttttttgggtttatttattaaatattgatggcgtttatattatatatttggtattatagagtatcgcggcgcggtattttattagagttggagaaatgaataatgtttcggcggtttgtatttttttagtttgtagagggggaaaaaatagtaataataattttattgagattttggttgtttgtttataatgacgatttttggtcgttttttttattttcgttcgttttttttagattacgtttttttttgtatcgtgttttagttgaggagggtattagaggttagagggatagagtagtgggtttttaaagtaaagttatggagatcggaagttaaggaaatgtgtttaagttttaggaaggaaatgttgcgaaagggaatggtttttcgggaagattggaggcggatattgggtaggtgtcgcgtaggattttgtttattttatatagtagttttcgattcgttttagtcgaggtagttaatcgtttattatcgttggtaattaatatttattgataaggttatatttagattgttatagttttttttagtattggggggaaatatttttttatattgcgtagtttataattttgtttattgttggttttcggttttaagttatttgtatttttattgttttgtaatttttgtttggtttatagcgttcgttcggtttaaggtgatagatttattttttagttttagtttttggttttagtttttagttttttttatttacgtgttttggattttttttatttttattggtcgtaatattttcgcgtttttattggttgacgttatcgattttttatttttattggtttttcgtagttgttttttttttttttataggagtttcgtggtaattttcgtttttatgcggatagaggcggggtttttttacgagatttggattacgattggtcgatttttgaaacgttcgattatagagttggcgggatttagaggttttataatttcgcgtataagatggcgattaaggtgtacgttgaagaaaaaggcgtgggagagatgacgggacgtgtgacgtagttagatatatgattttggtttcgagtttttattcgggtgtttgggttacggggcgcgttgtatgttgggattggtagttgcgttgaggggggtgtttaaggatagttgagatttcgcgagatattcgaggtcgggagagtcgatgtttttgtagtaatttttatcgtggaggtttgtggaaagatcgttttttatggagagtaaaggtcggttggaaagtttttaagcggtgagcgtagttttgtggattttagtcggtgtttagtagttatggattattatttagatggttttttaaaatatttgttgggtcgggtgtagtggtttacgtttgtaattttagtattttgggaggtcgaggcgggcggattatttgaggttaggagttcgagattagtttgattagtatggtgaaatttcgtttttattaagaatataaaaattagtcgggtatggtggtggcgcgtgtttgtaattttagttatttgggaggttgaggtaggagaatcgtttgaattcgggaggtcgaggttgtagggagtcgagatcgcgttattgtattttagtttgggtaattgagtaggatttcgtttcgggggaaaaaataaataaaaaaattgtttattttgtaaaaataatattgaaagaatgaaataatatttttatagaaaaacgagtaaaggataggaataggtaatttagtaaggaagaaatatgaattgtaggaacgaatgttagtttttttaattaaagaaatataagtttaaacgtttcgtttagtattgtttaaaatagtagagttttttttattaatgtgagttatacgtttttttatattgttggtgagaggatgaattagaaaattttttttgaaagtagtttggtaatatttatttttatttaaaggtt

SEQ ID NO: 63 - DNA, 1451 bp, Artificial Sequence
  chemically treated genomic DNA (Homo sapiens)
tagaaatagggttttattaggtttcgaatttttgggtttaagtaatttgtttgtttcggttttttaaagtgttgggattataggtgtgagttatagtgtttggttaaatattttattttttagattataagatgtttaattttatttttggtaaaaagttgatttagtaaattagggttttaagtgaagtcggttggggtttgaatttttgatatttgtttagggtggaagatatagtagttgtatttatgggttatttggggtgtagggtgattagttggaggttgtgagtttttttgttttttgaaatgtttgtacggggtatttaggaagggttggggattgggtgaggaggtgtggatagaatgttttttggaaattgttttaggggtagtttgagtggtttgagttgtgtttgttttattgaaggttggagttttagagaaaagtttttatggacggatttattttttagaattgttgtttttgcgggagaatatttttttttaggtgttgtttttagggtagtagggaagattgggaaaaattgaggggtaagagttgttggaggggggagttatatttattgagtgtttattatatgtcgggtgttgttgaaggtttgcgggttttataggatttttttttagatttttatatttttgtagattatacgtcgtttatagatgattttgaatttagaagggttgtttaggtttagggtttagttagtgagtggatgggtagaattagatttgttttggaagggtttgttttattttggcgtttaaaatgtgttttttattttttgttattaggataagtaaattcgagtattttttcgttaggggtttaagtttattatgggtttgatttttaaggttatattttcgtttttttatttgatagataggaaatttttgaaatgtttttcgtacgtgtaagacgttttcgcggtggcgggcgatagagggcgtatagtgggatcgtagtacgagttcggagtatttttagagtcggcgatttttgttttcgtttttgtcggtcggttttttcggggtttaggagggtagtatcgtcgggtttcgcgttatgatattagttttggagtggtgtagtgtgtaaagtttattggttggcgtggttcgggatacgttttcgcggagcggaataaaacggcgcgtaggtcgggcgtatttagtcgttattttcgagagcgtttgtcgtttttgcgtcgtcgagttagttgttaggtgagtgcgttttgagtcgcgcggttttgttcggcgcggaggggcgtttgggtacgtatttagcgtttttcggttttgttagtttcgtcgtagtttcggggttgtcgtaggcggggaattgtgagaagtgatcgtagttagttcgggtagtgttgtttttttttggaggtattaggttcgtttttatttcgggttttt

SEQ ID NO: 64 - DNA, 1451 bp, Artificial Sequence
  chemically treated genomic DNA (Homo sapiens)
gaaggttcgggatggggacggatttagtgtttttagaaaagagtagtattgttcgggttaattgcggttattttttatagtttttcgtttgcgatagtttcggggttgcggcggggttggtaagatcgggaggcgttgagtgcgtgtttaggcgttttttcgcgtcgggtagagtcgcgcgatttagggcgtatttatttggtagttggttcggcggcgtaggggcggtaggcgttttcggaagtggcggttgggtgcgttcggtttgcgcgtcgttttgtttcgtttcgcggaagcgtgtttcgggttacgttaattagtgggttttgtatattgtattattttagggttgatgttatggcgcgaagttcggcggtgttgtttttttaggtttcgggaaggtcggtcggtaggggcgggggtaggagtcgtcgattttgggggtgtttcgagttcgtgttgcggttttattgtgcgttttttgtcgttcgttatcgcgaaaacgttttgtacgtgcgaggggtattttaggagttttttgtttgttaggtgagaaggcggagatatgattttagaggttagatttatgataaatttgagtttttaacgaaagggtgttcgaatttatttgttttggtggtagagggtgagggatatattttgggcgttagggtaagatagatttttttagggtaggtttgattttgtttatttatttattagttgggttttgggtttagatagtttttttgggtttagggttatttgtgaacggcgtgtaatttatagggatgtgagggtttaaaaggagattttgtaggattcgtagatttttagtagtattcggtatgtaatagatatttaataaatgtaatttttttttttaatagtttttgttttttagttttttttagttttttttgttattttaaggataatatttggaaaaaggtgttttttcgtaaaagtagtagttttgaaaagtgggttcgtttatagaggtttttttttggggttttaatttttagtaggatagatatagtttaggttatttaagttgtttttggggtagtttttaggggatattttgtttatatttttttatttagtttttagttttttttgagtgtttcgtgtaggtattttagggagtagagaagtttatagtttttagttggttattttatattttaggtggtttatagatgtagttgttatgttttttattttgggtaggtgttaagggtttaggttttaatcggttttatttaaagttttggtttgttgaattaattttttgttaggaataaagttaagtattttatgatttagaaaatgaagtatttggttaggtattgtggtttatatttgtaattttaatattttgggaggtcgaggtaggtagattgtttaaatttaggagttcgagatttggtgaaattttgttttta

SEQ ID NO: 65 - DNA, 771 bp, Artificial Sequence
  chemically treated genomic DNA (Homo sapiens)
tgtcggtaaatttgttgatttaggttttacgagggagtaagtaatattggatttttttcggtatttcgagaatggggtgggggcgtttttaaaggatttttttttttttttagtgtttgtttttgttttcggttcgttttttgttaagatttggggatttttagggtttggagggaaagttttttgggacgattatagagcgttagtattgaattagtttggagagcgcggaaggaaagggtcggttcgtagagggcgcggggaaggtagggtggggacgcggtggagttcgcgttcgtttgttgaaggtttggaagtgtagcgtagaagatagagggtgattaggaagacgcgcgaacggggttggtcggtcggcgggtgggggaggggaggcgggggaaggcggttgagtgggtttttggagtgtgtgtgtttgtgttagtgtgtgtgtgtgtgtgtgtatgtgtgtgtttggcgtttggttagggtgattttttataaattatatgttttttagtttttttttaaaaggttgtgtcgagggttggttagtgaggttcggttcggggaaagtgaaagtttgtttgggttttttcggcgttagagtcgtttttcgtattttaggatagcggtgcggttttcggtcggggcgtttatttcgtagtagttagcgagcgagcgagcgagcgagggcggtcgacgcgttcggtcgggatttagttgttcgtatgatcgcgtcgggcgtcgtcgggcgttgtttttttacggtaa

SEQ ID NO: 66 - DNA, 771 bp, Artificial Sequence
  chemically treated genomic DNA (Homo sapiens)
ttatcgtgggagggtagcgttcggcggcgttcggcgcggttatacgggtagttgggtttcggtcgggcgcgtcggtcgttttcgttcgttcgttcgttcgttggttgttgcggagtgggcgtttcggtcgagggtcgtatcgttgttttgggatgcggagagcggttttggcgtcgagaggatttaggtaaatttttatttttttcgggtcgagttttattggttagttttcggtatagttttttaagagaggattggggggtatgtggtttatgggaaattattttggttaggcgttagatatatatatatatatatatatatatatattgatatagatatatatattttagaggtttatttagtcgttttttttcgtttttttttttttattcgtcggtcggttagtttcgttcgcgcgtttttttagttattttttgttttttgcgttgtatttttaagtttttagtaaacgagcgcgggttttatcgcgtttttattttgtttttttcgcgttttttgcggatcgatttttttttttcgcgttttttaggttgatttagtgttagcgttttatgatcgttttaagggattttttttttaggttttgaaaatttttaaattttagtagaaaacggatcgagagtagggataagtattgggaagggagggaaattttttgaagacgtttttattttattttcggagtgtcgaaaggagtttagtgttatttgttttttcgtggagtttgagttagtaggtttgtcggta

SEQ ID NO: 67 - DNA, 2580 bp, Artificial Sequence
  chemically treated genomic DNA (Homo sapiens)
gaattcgagtttataagtttttttaaaaaaaattgatttaagtaaattttgggaagagtttttttgttatataatttaaggttttaaggttttcggatttatatattttataaatgaattagttagtttgtttaaatgtagggaaattgtgggaagaatgttttttttatttaatttaaggttttaaggtttttttaattaattttattagttaattagttaattatttaaaaataaaagtttgaaattgttaaaaaaaaaagataaggaaaaggaaagaaagaaagttattagtttgtttggtatataatatttaattgttgtttgatttacgtgtgggttttagatgtagatttttagtttttagttttttagagattgatattaggtttgttatacggtttaaaatgatgagtatatttatgaattttaattttatttttttttagatttttttggttaagaaattatgtagtttgtatgaagtaggtatttaaaatatatttgatgatttaatttttattggagaagaaatatttatatatgtttttttatttttatatgttttaaatatgtaaagattaaataaatatttttagaagtatttaaattttttaaagtaaatttattttaattagtaataggatttttttaatattggaaagttgagtgtgatcgtatttagtggtgataagtgtgagtttgtttggggagagggtaggatatttaggattttttaagtttagagttaatataataaagattattgagtgtttatttgggtgggttataattattgtttataggagtttatgaattataagtaaaagagtgaggagatatgattagtttataaataatttttaatatagagtagaaagtaatgaattattgtaatggagttattatagtgttaaggatgtttagagggtatttttgataggtagaggtgagggttagggaaggaagttgtagtttagttagttagagttgttggaatagatatgataatgttgttgttaaattgtttttttttttgaggatagaatgtttcgtgtaagtggtttggtggaagggattagtgttttaatatagggtgatttataagtaggaaagtgtgttttagaaatttagattagagtgatagattgaattggattatgggggatttatttgaatgttatttattgtattgtttttgcgattagtgttagtaaagtgttaaagggattgagtagatgagtgatattatgtaatataagttttgagttttatttgttagattgattggagaggggtttggttagttataggaaggtaatttggtatgtagttattatttttgagttgatgtaagtttttttgtatggagagttggttttttttattttgtgggaaaagagaataaaggagtatgggagtgtttaagggaaggagaaataaagggtagagaggtagcggtggtgttagggaagtttataggagttaatagtagggttgttttaatttagagaggaagcgatttggtgttttcggttttgtggttttttttatttaataatattttttattttataataatgttagggaaggcggaggttggtatagtgtattaagatatagttatttttgggtgatagaggtttagggtagtttattaagtaggtagaagtttttgatatatattttgagagataaagtaagattttgtattttaatttttagaattttttttattatttattatagtttcggagttatatagtttttattattttattataattttagaatattagagaatatattattttatttaattattttttattatatgtgaaaaaaatgaaggatatgggggaagtgtgatttgttttaaattatatattttatggtagagttaggttttttgtttgttatattagtgttttttttgttataattattttgaagaatttattttttagtaagaaaatatttttatggagagtagttggaaaatagttgagagatggaggggaggttgggggtgtggagaggggaaggggtaagtgtatagattcgttgaaggggggagaaaaggtcgtggggatgaagttagaaggtagaagggtttgttgggtttggtatgaaggagtatgagtttattgagttttttttggtttttttatgttagtaatgtacgtggtttagtttgttgtggtattggttagtagtcgaggtatcgttagttttgtgtgtgagtatgtatttttaggtaaagttattgaggttcgggtgatagtgtttcggtaggttgatagttaggtgattgaagtttgtgcggtaatttatatgatggggaatgagttgatttttttagatgattttatttgtacgggtatttttagtggaaattaagtgaattttattatttaaggattgagggttatggatacgggattttatatttgtaaggtggagtttatgtatttatcgttatattatttgggtataggtaacggagtttagatttatgtaattggtgagtaaagttattttattgagttgatatttgttgtattgtagttttttatgtat

SEQ ID NO: 68 - DNA, 2580 bp, Artificial Sequence
  chemically treated genomic DNA (Homo sapiens)
gtgtatagaagattgtaatgtaataggtgttaatttagtgaaatggttttgtttattaattatataaatttgggtttcgttgtttatgtttaggtagtatggcggtgggtatatgagttttattttgtagatgtagagtttcgtgtttatggtttttagtttttggatagtgaggtttatttgatttttattggaggtgttcgtgtagatggaattatttaggaaggttaatttattttttattatgtaggttgtcgtatagattttagttatttggttgttagtttgtcgaagtattgttattcggattttagtggttttgtttggagatgtatatttatatataaagttggcgatgtttcggttgttggttagtattatagtaggttgggttacgtgtattgttagtatggaaaagttaaagggaatttagtgaatttatgtttttttatgttaagtttagtaagtttttttgttttttagttttatttttacggtttttttttttttttttaacgaatttatatatttatttttttttttttttatatttttagttttttttttattttttaattgttttttagttattttttataaagatatttttttattgagaaatagattttttaagatggttgtggtaggaagaatattgatatgataaatagaagatttggttttattatgaaatatgtgatttggggtaagttatattttttttatgttttttattttttttatatatagtaagagataattagatgagatgatatgttttttggtattttaaggttatgatagaatgataggagttatatagtttcggaattataatgagtggtaggggaaattttgaaggttgaggtatagaattttgttttattttttaaagtatatgttaaaaatttttgtttatttagtgagttgttttgaatttttgttatttaggagtagttgtgttttgatgtattgtattagttttcgttttttttggtattgttgtagagtggaagatgttgttagatgaaggaagttatagagtcgagggtattaggtcgttttttttttaggttgaggtaattttgttgttaatttttgtgggtttttttgatattatcgttgtttttttgttttttattttttttttttttgaatatttttatgtttttttgttttttttttttataggataaaggagattagttttttatatagagaggtttgtattaatttaaaaatagtggttgtatgttaaattatttttttgtaattaattaggtttttttttagttagtttgataagtgaaatttaaaatttgtgttgtatgatgttatttatttgtttaatttttttgatattttattaatattgatcgtaaaaataatataataaataatatttaaatgagttttttatgatttaatttaatttattattttggtttgaatttttaggatatatttttttgtttataaattattttatattagagtattagttttttttattaagttatttgtacgggatattttgtttttagaagagaaaatagtttggtagtagtattgttatgtttattttagtagttttagttagttagattatagtttttttttttaatttttatttttgtttattagagatgttttttgagtatttttagtattgtgataattttattgtagtagtttattattttttgttttgtattaaagattatttgtgagttaattatatttttttatttttttatttgtggtttatgaatttttgtgagtagtgattatagtttatttaagtgagtatttaataatttttattgtattgattttaagtttaagaaattttaaatgttttgttttttttttaagtaagtttatatttattattattaaatgcggttatatttaattttttagtattgggagggttttgttattggttgagataaatttattttaggaaatttaaatatttttaagagtgtttatttaatttttatatatttaaaatatgtaaaaataagaaaatatatatgaatattttttttttagtaaaaattaaattattaaatatgttttgagtatttattttatataaattatatggttttttagttaagaaggtttagagagagataaggttgagatttatggatatatttattattttaagtcgtgtaataaatttggtgttagtttttgaagagttgaaaattgaggatttgtatttgaaatttatacgtaggttaggtaataattaagtattgtatgttaaatagattggtggttttttttttttttttttttttgttttttttttttggtaattttaaatttttatttttaaataattggttaattagttagtagaattgattaagagaattttaaaattttgaattaagtaaagaaggtattttttttataatttttttatatttaaataagttggttaatttatttataaagtatatgaattcgaggattttaaaattttgaattgtatagtaaaaaaattttttttaggatttgtttaagttaattttttttaaaggaatttgtgagttcgaattt

SEQ ID NO: 69 - DNA, 5001 bp, Artificial Sequence
  chemically treated genomic DNA (Homo sapiens)
aagtttaaaagataattgttttagtatttaatttaaaaaatataaattagttagatatagtggtgtgtatttgtagtcggagttatttaggagattgagataagaggattatttgagtttaagggtttgagattagtttgggtaatagcgagatttagtttaaaaaaagaaaaaaaaacgttaataataataaaaaaatttattcgtttattaaattatttgtaaggcgtttgaatgaaaggtgttttttttattgtggttttgtttagggtatttatagttgtaggtgagttaatttgtttggttttgttttttttaggtttgtttttttatgatttatttgtgtgagaaaattatttttacgttgtttttttggaggaagtttaatggatttaattagttgatgtcgttgtagtagtttgtgtacgacgtgtaggattagttgaattttttggttagcgaggaggattttaggcgtattgtttagtagttttatagtataggcgaggtgagtttttgggagtttaggtagggggtcgtgagaggtgttagggatttagtttgttttaaattttagtttttggaagtggtgtgagtttggggaagtagtgtggaaatggtttagttaatttataatatttttatacgtgtgataaatatagttttaagtgacgttttgaattgtagttttcggtttattttaggagttgttattttgttttgtcgtgttttgtttttatttttagagtttgttagtttgggagtgtagtgtttattgttttgggtgattgggtttttttttattttttttgggtattaggaatttaatttgttatttttggtagtttttaggatggtttttttgtattagcgtggagttattagttttatatagattttttgggtgggaaaatagttgagaaaaggtagtgaggtgtttttgtggaggtaatgtttggagatataaagatagagaattttggtgtatagatatatagagtaattataattaaagatgtatattaaaaaattttagtaagtaatgtttagtagaaatgattgagaatgggaggttttgttttggttttgtgatattgagtattagggcgcggtttggaaattttgttttaatggtattatatgtttgttttaggaacgggggtagtgttttcgtgtttttttattatgtgaaattgggagtttatatgaattagtgtgggttaagaagagcggttttgaatattgtaattaaaagtagttttgagattattaaaagttagatgtttatttttttaattttaggtgttaggtttggttttatagttagtttgtatgagttatataaattttttgaaattaaatttgaatttataagttagtgattttgaaaattggagtcgtcgggtagtaattttattagtttttaaatttttagttaaatggttagagaatttgttaatttatttaggaatattttaaagtgattgaatttaaggaagaatataggtgaaggattatattttagatgataagatattgttggatgtaaaaaatgtgttaattttaattttaaatttttttggtataggagttttttgttttttagtagtagattagtaattttttagattatattatatagttttttttatttgttattatatttttgtttgtttttgagagtttagtaagtaaatgaagatgtaaagaaggagggtaattaggtagtaggaattatattgtgtggttcgattttgattggtttcgggttttttttagatttgtttttcgtatttaatttgtagatttttagaattttttagtggtttttttgattttgttttttggtttagggttttatattacgtttagttgattgttttagttttttgtttttttttattatgggatagtttcgttttttttgagtttgaggcgatgagtagtgtttaggattaaattgtaaatggtattttagtaaatgttgtattaggaattagattaatattggttttgttttttagaatttttaatttaggtttaattttgaatagatttttagatagggggtattttttaggtttaagttagattgtggtaggaaattattgtgtggtttcggtggggttagagtttttaagtgagggagtttagggcgatggttattttttaagaaaggaagtagaatttttttataaagggaaagttttttttgttttttgttattttttttttttttttttttatttttttaagaaataaatataattaaaaagttaaagtttttttgggttattatttttggttttatttttttttttttttttcggaggttaattattattatggtagtatatttttttaggttttttttatgtgtgtgtgttaaatatttatataatggtataataatagaatgttttgatttttttttgaaaatgtttttaagtttttagagaagttgtaaggatagtattatgaatttttatataggttatatttatttatttttttaattaattaattaatttttttttttttttttttgagatagagttttattttgttgttaaggttggagtgtagtggtataatttcggtttattgtagttttcgttttttgggtttaagtgattttgttttagtttatagatataagttattatatttaattaaattttgtatttttagaagagatagggttttattatgttggttaggttggttttaaatttttgattttaagtgatttattcgtttcggttttttaaagtgttgggattataggtatgagttacggtgtttagtttattatatttaagttgattagttgttgatattttgttatatttgttcgattttttttttttttatttatttatttatttattttgtagatatgatgatattttttttttaaataatttagtttatattttttaaggagaaggatatttttttatataatttaatataattgatgattttagaaatataatattaatatagtattatgattgaatatattatttttatataagggtttgttattggttttaataattttttttaaagttatttttatttatgtatttattttgggatttagaatttagtttaaaattatttattgtatttggttgttattttttatttttttttttttttttatttcgttggtttttttgaagattttaggggagttgttttttagaatttttattttgatatttttaagttgtttttttttattcggtgtttggtttttgagacgtatttacgtggaatggttttgggttattttttagagtatttgtttagtttttgttgtcggtattaggttttttagtgttttaagtggttggtgtatttggttagggttttgtttttaagcgtgattttttgttgttttttcgtagattaatattatgtaaagtgaaatagtttaggacgtgttgtttttggattttcgttggttttgtataaacgttttggggaagttgttgttcgtggagattttacgggcgttgtattattatcggggtcgttatatcgtggaggatatttagcgtttggtgttcgatagcgacgtggaggagttgttgtagattttcgatgttatggatatttgcgttcgggatttgagtagcgggattatggtggacgttttagttttgattaagatagataatttgtatcgtttttgggttgatgaggaggacgaggtgatggtgtatggtggcgtgcgtatcgtgttcgtggaatattttattttttttttatgtggtattttttataaggtttaggtgaatttgtgtcggtggatttattagtaaagtatagagggcgacgcggatattcgtttgtgggtgaatggttgtaagttggttaatcgtggggtcgagttgttggtgttgttggttaattacggttagggtattgaggtttaggttcgcggtttggagacggagaagattaagtgttgtttgttgttggattcggtgtgtagtattattgagaacgttatggttattacgttgttagggtttttgatcgtgaagtattatttgagtttttagtagttgcgggagtattatgagttcgttatgatttattagttacgggatttttttcgggtatagattttgaaggaaattttattgattaatattatgggggggtataaggaaagttttagtagtattatgtgtttcgggtgttacgacgtttatttataggttagtttcggtatggatatttatgtattagatttgaatttttttattcggaggaaattgagtcgtttgttggattcgttcgattttttggggaaggattggtgttttttcgttatgaatttaggtttttttgatttcgtggtaaagtataatattagtaacggggtttttaaggattttttttttagttttttttacgttttgttgcgggaatggattatttattttgagagtatagtgggtatttttatgtttaaattgagggagttgggtcgtcgggatgtcgtagattttttgttgaaggtattttttgtgtttaaaattaatttggatggtaatggttaggaggtttatgtttcgagttgtaatagcggtattttttataattttattagttttgttgtatttcggtgagggtagtttttggtttgggtagggtttgtttggattgtagaagtaagggggtgatgtagtttatttttttttttggagatgttgagggtgtttttttttgtatttatagttagggggatgttattttttttttcggtttgatttgtttttttgtcgttattttttttttcgttttatttcgttgtttgtggatggttattgtagtttaagagtagaatagattttttattttggtcgtttgaaaagttagtgtatttttttttagtgttttggattttattttttattttttagtattttgttttttattgataattttgttggaatttttaattttttaatgatattt

SEQ ID NO: 70 - DNA, 5001 bp, Artificial Sequence
  chemically treated genomic DNA (Homo sapiens)
aaatgttattgaaaagttaggaattttagtaaaattattagtaagaagtaaggtattggaggatgagagatggagtttaaaatattgagaggaggtatattagttttttaagcggttaaagtaaaagatttgttttgtttttaaattgtaatgattatttatagataacggaatgagacggggagggaggtagcggtagagaaataggttaagtcggagggaggagtggtatttttttggttgtgggtgtaggaagaaatatttttagtatttttaaagggaaggatgggttatattatttttttgtttttgtagtttaaatagattttgtttaagttagaggttgtttttatcgggatataatagagttaatggaattgtaagaggtgtcgttgttgtagttcgaggtataggttttttggttattgttatttaggttgattttgaatatagaggatgtttttagtaaaaagtttgcggtatttcggcgatttagtttttttagtttggatatgagggtgtttattgtgtttttagggtaggtggtttattttcgtagtagggcgtggagggggttggggaggaaatttttgggagtttcgttattggtgttgtattttgttacgaggttagggaggtttaagtttatggcgagaaggtattagtttttttttagggggtcgggcgggtttagtaggcgatttagtttttttcgagtgaggaggtttaggtttgatgtatggatgtttatgtcgaggttggtttgtgagtagacgtcgtgatattcgaagtatatgatgttgttgaagttttttttgtatttttttatggtgttggttagtgaggttttttttagagtttgtgttcggaagaagtttcgtggttggtagattatgacgggtttatggtgttttcgtagttgttgggggtttaggtaatgttttacggttaggagttttggtagcgtggtggttatgacgtttttaatggtgttgtatatcgagtttagtagtaggtagtatttgatttttttcgtttttaggtcgcggatttggattttaatgttttggtcgtggttgattagtagtattagtagttcggttttacggttggttagtttgtagttatttatttataggcggatgttcgcgtcgttttttgtgttttgttggtggatttatcggtataggtttatttggattttgtgaaagatgttatatgggaagggggtgaggtgttttacgggtacgatgcgtacgttattatatattattatttcgttttttttattagtttaggagcggtgtaggttgtttgttttgattagggttgggacgtttattatggtttcgttgtttaggtttcgggcgtagatgtttatggtatcgaggatttgtagtagtttttttacgtcgttgtcgggtattaggcgttggatgttttttacggtgtagcggtttcggtagtggtgtagcgttcgtggggtttttacggatagtaatttttttaggacgtttgtgtagagttagcgggggtttaggagtagtacgttttgaattgttttattttgtatgatgttgatttgcggggggataatagaaagttacgtttagggatagagttttggttaggtgtattagttatttagagtattaaagggtttgatgtcggtaatagaggttgagtagatgttttaaggagtgatttaaggttattttacgtggatgcgttttaaaaattaaatatcgagtggagaaaagtagtttgaaaatgttagaatagagattttgaaaaataatttttttgaagtttttaaaaaggttagcgaaatgaaagaagaaaaaaaaatgggagatggtaattaaatgtaatgagtgattttagattggattttgaattttaaaataagtatataaataaaaatagttttaaaagaaattattgggattagtggtaaatttttgtatgaggatgatatatttaattatagtattatattaatgttatgtttttggaattattaattatattgggttatgtgggaaaatatttttttttttaggagatataggttaaattatttagggaagaaatgttattatgtttgtaaaataaataagtaaataaatagaaaggaaaggaatcgagtaaatgtagtaaaatgttaataattgattagtttaaatgtagtaggttgggtatcgtgatttatgtttgtaattttagtattttgggaggtcgaggcgggtggattatttgaggttaggagtttgagattagtttggttaatatggtaaaattttgttttttttaaaaatataaaatttagttgggtgtgatggtttgtgtttgtaggttgaggtagaattatttgaatttaggaggcggaggttgtagtgagtcgagattgtgttattgtattttagttttggtaatagagtgagattttattttaaaaaaaaaaaaaaaaaaattaattaattaattaaaaaaataaataaatgtagtttatatgagagtttatggtattatttttgtaatttttttaaaggtttgagaatatttttaaaaaagagttagaatattttattattatattattatgtgaatgtttaatatatatatatagaaaaggtttgaaaggatatgttgttatgataatagttggttttcgagaaggggagagaggagtgagattagagatgatggtttaaggggattttagttttttggttgtgtttattttttaaaaaaataaaaagaaaggaaaaaaaagtgataaaaaatagaaggaattttttttttatggaagagttttgtttttttttttggagagtggttatcgttttggatttttttatttggaggttttgattttatcgggattatatagtaattttttgttatagtttggtttaaatttaaaagatgttttttgtttaagagtttatttagaattgaatttaggttgaaaattttggagggtagagttaatattgatttagtttttgatatagtatttgttggaatattatttgtagtttggttttaaatattgtttatcgttttaggtttaggaaagacgaaattgttttatagtggaggagaatagggagttaagatagttagttaaacgtagtgtgggattttgggttagaaaatagagttagaagggttattggggagttttgaagatttgtaaattagatacggaaggtaggtttggaggaggttcggggttaattaaagtcgggttatataatgtagtttttgttgtttaattattttttttttttatatttttatttatttattaaatttttaagggtaagtagggatgtaatgataaataaaggagattatatgatatgatttagaaagttgttggtttattattagaaagtaagggatttttgtgttaaaggagtttagaattagaattgatatattttttatatttagtagtattttgttatttaagatgtggttttttatttgtgtttttttttggatttaattattttaaagtatttttggatgagttggtagattttttggttatttaattgggagtttaaaggttgatgaaattattgttcggcgattttagtttttaaggttattggtttgtggatttaggtttagttttaagaaatttgtatgatttatataaattggttatagggttagatttggtatttgagattggggaggtaagtatttggtttttaataattttagagttgtttttagttgtaatatttagaatcgttttttttggtttatattagtttatgtaggtttttaattttatatggtggagaaatacgaaggtattgttttcgtttttgggataggtatatgatgttattagaatagggtttttaaatcgcgttttggtgtttaatgttatagaattagagtaaagttttttatttttaattatttttgttgggtattgtttgttagagttttttaatgtgtatttttaattatgattattttgtgtatttgtgtattagagttttttgtttttgtatttttagatattgtttttataaggatattttattgtttttttttaattgtttttttatttaggagatttgtgtggagttgatgattttacgttgatataaagaagttattttgaaggttgttaggagtagtagattaagtttttggtgtttagggggagtgaagagagatttagttatttagggtagtgggtattgtatttttaaattaatagattttggaaataaaagtaaaatacgataagataaaatgatagtttttaaggtgagtcgagaattgtagtttagagcgttatttgaggttgtgtttgttatacgtgtggaaatgttgtaggttagttggattatttttatattgtttttttaggtttatattatttttaagagttggaatttgggataggttgagtttttggtattttttacggttttttgtttgggtttttaggggtttatttcgtttgtgttgtggagttgttgagtaatgcgtttgaggtttttttcgttggttagggggtttagttggttttgtacgtcgtatataaattgttgtagcgatattagttggttgggtttattgagttttttttaggaaggtagcgtggagatgatttttttatataggtgagttatgggaggatagatttagagggggtagggttagataggttaatttatttgtagttgtgggtgttttgagtagagttatagtggaaaggatattttttatttaggcgttttgtaggtgatttgatgaacgagtgggtttttttgttgttgttgacgtttttttttttttttttagattgggtttcgttattgtttaggttggttttaaatttttgggtttaagtaatttttttgttttagttttttgagtagtttcgattataagtatatattattgtgtttggttagtttgtgttttttgggttgagtattggggtagttgttttttagattt

SEQ ID NO: 71 - DNA, 3158 bp, Artificial Sequence
  chemically treated genomic DNA (Homo sapiens)
tttcgttttcggattttacggttgtaaattgatttggcgcgcggggaggaggagagcgtaggcgagcgaattcgcgagagagggagagagcgagcgagtaatagcgagagcgagagcgagagagtcgggaggtagagggagtagtgatcgtttttcggagtcgggatttatgtttgttttcgggattagcgaaggggattttacggttgagtatgagttaggttgttaggagttaggtatttttacgtttgtagttttcgcgtcgtgttcggaatgcgagttggacgtagggtttttttaagtttttatcgagtcgaataaaaagcgttcgttcgtagtttttcgttaaagacggatattgattttaggattttatagaatggagtaagaatgagaggaaaaaggtcggtagaaaagtatgaattggaggtttgttgagtttttttattttttgtttatatggggtcgtattttagtgtagtttttttattaggaattagttgggatagattaatatgtttttaaggaatttgattggtttattttagatagggggtttttttattattttaggagttatttattttttgtggaaagatatcgttaaggatttataattagatataaaatatatagggagtttgttcgttggaaggtgaggaatatagttatcgagaggagagatttggttcgttatttagtgttttttatgtcggagttttaaaggagtattcgtttgtttggtaggagatttattatttagtagtttatcgatattattattaaaaagtacggtatttatttgtttattttagttatattgggaggggaggaggttttgattatgtatatggataaaagtcgtttcgataggaagttagggaatgttatttaaagtgttgaagttttgtattagttcgtattattttattttgttgatcgtgatggtattatgaggaggttttatgagatttagatattaattggagtaattaaggttatagagatacgtattgggtttttgggttgtaatagttatgataatttggattttgtgagtttcgtttttttgtaaagtacggagagtaaattgtatttttaaggtttttagataatttttttttagtatttgtaagagaagtttgtttagtcggttttgagttatattatgtgtaatggggagggggagtatttgtgttagaatagttagtgtcgttgttaatgtgtcgaggagttttcgtagtgtaattgttttattacggatatttagattatggagtatacgttggttaatatggttaagttttgggtcgaagtttataaggatttggagaatttagatgagtttaaattatttatgaagcgtttttttagtaattattttttgattatcggaagtatttattagtattggggtaatgattgggatttgtagaatcgttataagtttttgtagagtgttacggaggtatagagataaaagatttaacgtattgttcgtaagtttttcggttttagtgtacgttgtcgttataattttaattattagttgtttagagagaggataatttagtagtggtttgtaagggtttagttatttttttattgtaatgagaatgggttttggggaatttttttggagagttagcggagttgcgtgtgttacggtagtattacgttgtgttagcgttttattttttgcgtgataggcgggaataatagttgtattatgtgtagtttggttaatatttttttttgtggtttttgtaataagggttataagttgtatcgaggtcgttgtgaattatagaacgtggattcggagcggagcgagtagtttattagttttgagattgatttggatttttaggatttggagttgaagtatttgttgtagaagatggatttacgtttttacgtttatattatttttattagtaacgagattcgtttcgatattttttttgattttcggtggcgtaagcgtatgttttttatttttaagagtaataagaatcgtatggattttatttatatggtgatcggtatgtttatgcgtatttgttagatgcgtaatagtagtttggattttatgttttttgtttatgttaatttttttagcgggagttattcggagggttggaatatgtttttcggggaatttggttatttacgttgggagaagattcgtttttaaaatagttagtgttataattggatttttttgttgggtaatcggtggaaaatatttttcgagacggtttatatttatttacgtagtcggattcggttatttattttattgcgaaatgagattggttagggtttcgtggatttgtcggatttttttaagaggtagttttatattaagattttagacgtgtaggtgtttgggtatagtttgaggtttaacgtcgattttttgcgtagtgtagtgtagtaggttaattagttttatatatagggcggttagttttattttttttcgttagtgatgttttttttgttggatattcgggatcgaattaatcgtttggttttttttgtggtttcggggaaattttagttggatttgtttttttgtatgttgaaatatcgtttgaaattgattaatagcgagattattagggtgaattacgttttggatttgtataatacggagatttttaaatagtcggattagatgatagttaaattttgttaattcgggattttttgttatggattttttttgttgttgtatatatataatagaataaaatgaagtaaaataaaataaaaaaatttataaaaatttgtaaaatgtaattaatatttaaagaaaaggaggaaaatttttatttgttggaaatgaaaacgttttagtaattgtataaaagcgttgggtatgtttgttatttttatatttattttgttatgaagaagggttttagttttttgtggagtattgagggagttgttttttaggttttaggtgttgtattgggggagaagggagaaagtatatgtaatgaattgtaaagatttttgttgtgtaggtgttaagattaaatattaaaaagaaagagagatatatgtaatgtataattgatattgttattttttttttttggaggaaatggatatagataaagaagatattttttcggttaagattt

SEQ ID NO: 72 - DNA, 3158 bp, Artificial Sequence
  chemically treated genomic DNA (Homo sapiens)
aaattttaatcgaagaaatattttttttatttatgtttattttttttaaaaaggaaaaatggtagtgttagttgtatattatatatatttttttttttttttagtgtttaattttagtatttgtatagtagagatttttataatttattgtatatgttttttttttttttttttaatatagtatttgaggtttaagaagtaatttttttaatgttttataaaaggttgagatttttttttatgatagagtgagtatagaaataataaatatgtttaacgtttttatatagttgttagaacgtttttatttttaataaatgaagatttttttttttttttttgaatattaattatattttataaatttttgtgggtttttttgttttgttttgttttattttgttttgttgtgtgtgtataataataggaaaagtttatggtaaggagtttcgggttagtagagtttggttgttatttggttcgattgtttgaggattttcgtgttgtataggtttaaggcgtggtttattttgatgatttcgttgttggttagttttaggcggtgttttagtatataggagaataagtttagttggggttttttcggggttataggaggggttaggcgattaattcggtttcgaatatttaataagaggagtattattgacgaagaggaatagaattggtcgttttgtgtgtaggattggttgatttgttgtattgtattgcgtaggaggtcggcgttgaattttaggttatatttaaatatttgtacgtttgagattttgatgtagaattgttttttggagggattcgataggtttacggggttttggttagttttatttcgtagtagggtaggtagtcgagttcgattacgtaggtagatgtggatcgtttcgaaaaatgttttttatcgattgtttagtaaaagagtttagttgtagtattggttgttttggagacggatttttttttagcgtgggtagttaaatttttcgaagggtatgttttagtttttcgaatggttttcgttaaaggggttgatatagataaagaatatggggtttaggttgttgttgcgtatttggtagatgcgtatggatatgtcgattattatgtggatgaagtttatgcggtttttgttgtttttgagagtgagggatatgcgtttgcgttatcgagggttaaagaaggtgtcgaggcggatttcgttgttgatgaaggtggtgtggacgtagaggcgtgagtttattttttgtagtaggtattttagttttaggttttggaagtttaggttagttttaaagttgatgaattgttcgtttcgtttcgagtttacgttttgtggtttatagcggtttcgatatagtttgtagtttttgttgtaggagttatagagggagatgttggttaggttgtatatggtgtagttgttgttttcgtttattacgtaggggatggggcgttggtatagcgtggtgttgtcgtggtatacgtagtttcgttggttttttaggaaggttttttaaaatttatttttattatagtagaggagtgattggatttttgtaagttattgttgaattgttttttttttaggtagttggtggttgggattgtggcgatagcgtatattgaggtcgaaaagtttgcgggtagtgcgttggattttttgtttttgtgttttcgtggtattttgtaggagtttgtagcggttttgtaggttttagttattgttttagtgttgatggatgttttcgatggttaggaagtggttgttggggaggcgttttataaatgatttaaatttatttgaattttttaggtttttataagtttcggtttaagatttggttatgttggttagcgtgtattttatgatttggatgttcgtgatggggtagttgtattgcggaaatttttcggtatattggtagcgatattggttgttttggtataggtattttttttttttattgtatatgatatagtttaaggtcgattggataaattttttttgtagatattgaggaaagattatttgaagattttgaaggtgtagtttgtttttcgtgttttgtagaaggacggaatttatagagtttagattgttataattgttatagtttagaggtttagtgcgtgtttttgtgattttgattgttttagttgatatttggattttatgaagtttttttatggtattattacggttaataaagtaggatgatgcgagttggtgtagagttttaatattttgagtggtattttttgattttttgtcgaggcgatttttgtttatatatatggttaaagttttttttttttttaatgtggttgagatgagtaggtgggtgtcgtattttttgatgatggtatcgatgaattgttgagtggtaggttttttgttaagtaggcggatgtttttttgaaatttcggtatgaggggtattggatggcggattagattttttttttcgatggttgtgttttttattttttaacgggtaaattttttgtatattttatatttggttgtaaatttttgacggtgtttttttataaaggataggtagtttttggagtggtggaaaggttttttgtttgaaatgagttaattaaattttttggagatatgttggtttgttttagttggtttttggtgggagggttgtattgagatacggttttatataaataggaagtagaggagtttaataaatttttagtttatgtttttttgtcggtttttttttttttatttttgttttattttgtggagttttggagttaatgttcgtttttggcggagagttgcgggcggacgttttttattcggttcggtgggaatttgggagagttttgcgtttagttcgtatttcgggtacggcgcggggattgtaggcgtgggggtatttggtttttagtagtttggtttatatttagtcgtaaagtttttttcgttggtttcgaggataggtatgaatttcggtttcggaaggcggttattattttttttgtttttcggttttttcgttttcgttttcgttgttgttcgttcgttttttttttttttcgcgggttcgttcgtttgcgtttttttttttttcgcgcgttagattagtttgtagtcgtggggttcgggagcgagg

SEQ ID NO: 73 - DNA, 3720 bp, Artificial Sequence
  chemically treated genomic DNA (Homo sapiens)
tgtagttgtttattaaaattttatatatattttggtatataattatattcgttggaatttattttatagatatatttatatttatatagttaaggatgttgattttaataatattggtataagtaaaaagttggaaattgtttatatgtttatggataggggataaatcgattaatttaaggtttttttttataatggagtattatatagttttgaaaaagaatgataagatttttatgttaggatatggtataatttttaagttattttaagtgaaaaaataataataataataatattgtagaataatgtgtatggttggatatatataaatttttttgaaagaatatttaagaaatttaaatgtggttattttaggagttaggaatgaggtaggtggagaggagggatttttattttttaatttagaatatattttgttgtgttagttgattttttttttattgttaataagtattatagttttttttaatttaaattattttttttagtataaatttaaaaaaaaaaaatttaaaatggaaaaatatataggcgtgagtaaaagaaatgaatggtaataatttttgtggtttattgagtgcgtttggatatttatgtgtttttagtttttttttataggaaatgtataggtgagaaattgacgttaagggggattgagtgttaagttagttagtggtagagggtagatttaaatttaatacggtttttttttgttgtttttcggtttttgtttttaggtgggaagcgtatttatcggacggtcggttcggtgaggcgtagcgttttagattggcgtattcgcggttttagcgttttacgtttggggagcgcgcgcgtacgtagcggcgcgagtttggcggcggcggcgataataataacgttatagttcgagttttttttttcggagttttcggtatatattttgtgtttatgtttgggtatttacgttacggcggtagggtcggggttttttaaaatggtagtggttcggggagtcggaagttcggagttagcgtcgtcgtagttatataagtgggggggttgtgggttgggggagttcggtagcgttttggagaggcgaggagtcgtcgttcgaggtcggtgcgggcgagcgagggcgtcgcggtttttcgattttttttttagaggtgagtgttcgaagttaggagttcggcgtttataggtttgtgcgttgcggggaatttttatcgttagttttttcgttattcgcgcgtttttaagtttagcgggcgaggtttcgggcgttttatagtcggcgtcgcgttatgttttattttagcgagtttttcgaattcgacgcgtttttcgttaagtttattgaaggttgttgcgtcgaatttagcgttgaattgtttcggttgtttgttagggacgttttcgcggttatcggttattttggaggtaaggagggcgagtaggggtgtttagacgacgacggcgtagcgcgggggcgtattatatttgagaattaggagggattgggatattggagttatgagaataggggcgatgggaagtttaggagttttggggtgcgtatttttatttttatttatattgggtcgttagcgttttcgtaggaatttgtgcggttatcggagcgtttttttgtttgtgtacgtgtgttttgcgtgtgtatgtttttatgtgttttttgggacgtatgcgggtttttgttgaattagaatgtgtaaaaggtattttgtgtatattcgtgggtattaagagttttgtaggtaggggttgtggatttaggtgtattttttgatgtgtttagagttgatttttgttttttttttagtaggcgattttttgagttgggttttgaatagttgcggcgtaagtggggatttagtcgatttttgttttttggaggggtttgcgtttatattttttttcggttttagttatagcggtagtttttttatttaggtagtgttcgaatattcgtacgattcggaggtattttttaattttatgtcgggcgttttaggtttggtattttttttcggtttagaggtagtagcgtttagattttcgttggatgtttttttttttgcggggttcgatgttttgttgtcgggttcgtcggatttttatttttcggatttgggcgttgttttttttttagaggcgttttgggaggtttcgttttgcgcgggtgttttttcgtagtgtttgtatgagttttagtttttttcgttcgacgttaagttcggttttcggcggtttttcgtttcgttagcgttggacgttgtttttgtttttaagggtttttacgcgttttgggagttgttttttgtgggggttttagggaattgtgggttatagggagattattaggtcgtttcggaggttcgttttttcgtaatagggattaagattgaggatttgttgtttattagttgttttgcggaattgtcggtcgttttagttaatagattttattttagcggggtttatgacgttttttcgttggtttcgggtgatttaggggagggggttgagggtttttttgggtttttgattttttttagtggggagggagggagtagcggcgacggcggagagtttttggttagtacgtagttttagtttttttcgttgggttttcgtagcgtcgtcgcggcggatttttttaaatttttggtggcggatatttttggaagtagtggcgtggttgtattattcgtgtcgtcgtcgtcgtttattttttttttttaggttaaggcgcgacgtaaggggcgtcgcggcggtaaatgtagtacgcgttgtttttgttcgcggtcgtacgttaaggttttcgtttgttcggtggagagttgtgtgcggagttttgcgcgtttcgacgagtttaatcgttatttgcgtatttatacgggttataaatttttttagtgtcgtatttgttttcgtaattttagtcgtagcgattattttattagttacgtgcgtatttatatcggcgagaagttttttgtttgcgacgtgtgcggtcgtcgtttcgcgcgtagcgatgagaagaaacggtatagtaaggtgtattttaagtagaaggcgcgcgtcgaggagcggtttaagggtttcggtttttattcgttgggtttttttttcgtttttttttgagtaagagatgggtttatgggttggggcgtcgtcgttcggcgcgtacgagtttcgggtcgttttttttttcgttttttttttaattttttttcgtacgttcgagggtcggttttcgtttcgtttttagtttttttgaagcgttcgtcgtatacgttttatttagtattagttcgtcggatagttttcgcggtttaggcgttgttatttttgttagtcgcgttttgggggaagttttttgagattatttagtgaataggtattattttgggatttaagatagttttttgtaattgtatacgttttacgtttttttttataatttttagagataggttggggtaggttaaggcggtttcgcgcgggattttgtatagtagtgttttatttagtagtcgattggatgtaacgttttgttttgggttttttttttttttgttgttgttaatttttgtaaagtagacgttatttttaagtagttgataaaattgtttatttttgtaattaaaattattgtgttaaaagtttattgaatttgttatgtaagttttt

SEQ ID NO: 74 - DNA, 3720 bp, Artificial Sequence
  chemically treated genomic DNA (Homo sapiens)
aggagtttatatggtagatttagtaagtttttagtataataattttaattgtaaaaataaatagttttgttaattgtttgagagtagcgtttgttttataaaaattaataataataaaaggaaaaaaaatttaaagtaaaacgttatatttaatcggttgttggataagatattgttgtataaagtttcgcgcgagatcgttttggtttgttttagtttgtttttgggggttatagaggaaggcgtggggcgtgtgtagttataaaagattgttttgaattttagggtagtgtttatttattgggtggttttagaagattttttttaaagcgcggttgataagggtgatagcgtttggatcgcgggaattgttcggcgagttggtgttgaatagggcgtgtgcggcgggcgttttaaggaaattggaagcgggacggaggtcggttttcgggcgtgcgaggaggagttggaagaagagcggggaggggaacggttcggaattcgtgcgcgtcgaacggcggcgttttaatttataaatttattttttgtttagagagaagcgaaggagaggtttagcgagtaaaagtcgaggtttttgagtcgtttttcggcgcgcgttttttgtttgaggtgtattttgttgtgtcgtttttttttatcgttgcgcgcgaagcggcggtcgtatacgtcgtaagtaaaaggtttttcgtcggtgtgggtgcgtacgtggttggtgaggtggtcgttgcggttgaagttgcggaggtagatgcggtattggaagggtttgtggttcgtgtggatgcgtaggtggcgattgagttcgtcggagcgcgtaaagtttcgtatataattttttatcgggtaagcgaaggttttggcgtgcggtcgcgggtagaagtagcgcgtgttgtatttgtcgtcgcggcgttttttgcgtcgcgttttggtttgggggaaaggggtgggcggcggcggcggtacgggtggtgtagttacgttattgtttttagggatgttcgttattagaggtttagggaagttcgtcgcggcggcgttgcgaaggtttagcggggaaagttgaggttgcgtattggttagaaatttttcgtcgtcgtcgttattttttttttttttattaggaggggttaggagtttagggaggtttttagtttttttttttaagttattcggggttagcgggaaagcgttataggtttcgttgggatagagtttgttggttgggacggtcggtagtttcgtagggtagttgatggatagtaagtttttaattttggtttttattacgggaaaacgagttttcggggcggtttggtagtttttttgtgatttatagttttttggggtttttatagaaagtagtttttagggcgcgtagggatttttgaaggtagagatagcgtttagcgttggcgaggcgggaggtcgtcggaggtcgggtttgacgtcgggcggggagagttgaggtttatataggtattgcgagggggtattcgcgtaaggcgaggttttttagaacgtttttgggaaaggggtagcgtttagattcggggagtaaaggttcggcggattcggtagtaaggtatcggatttcgtaggaaaaggggtatttagcggggatttggacgttgttgtttttggatcggggaagggtgttaggtttaagacgttcgatatgaggttgaagagtgttttcgggtcgtgcgggtgttcgggtattgtttgaatgaagaagttatcgttgtagttgaggtcgggagggggtgtgggcgtaggtttttttaggaagtaggagtcggttaagtttttatttgcgtcgtagttgtttaaagtttagtttaagaagtcgtttgttgaggagggagtaggaattagttttgggtatattaaagggtgtatttgagtttatagtttttatttataaaatttttggtgtttacggatatatataaagtgttttttgtatattttgatttagtaggggttcgtatacgttttaaggagtatatagaaatatgtatacgtaaaatatacgtgtataggtaaaagggcgtttcgataatcgtataggtttttgcggaggcgttggcggtttagtgtgggtgggaatgggggtgcgtattttaggatttttaagttttttatcgtttttatttttatagttttaatgttttagttttttttggtttttaggtatggtgcgttttcgcgttgcgtcgtcgtcgtttgagtatttttgttcgttttttttatttttagggtagtcggtggtcgcgggagcgtttttggtaggtagtcggggtaatttagcgttgggttcggcgtaatagtttttagtggatttgacgaggagcgcgtcgggttcggaaaattcgttaaggtggagtatggcgcggcgtcggttgtggggcgttcggggtttcgttcgttgggtttgggggcgcgcgggtggcggggaggttggcggtaggggtttttcgtagcgtatagatttatgggcgtcgggtttttggtttcgggtatttatttttgggaaaggagtcggggagtcgcggcgttttcgttcgttcgtatcggtttcgggcggcggtttttcgtttttttaaagcgttgtcgggtttttttagtttatagtttttttatttatatagttgcggcggcgttggtttcgggttttcgatttttcgggttattgttattttgggaggtttcggttttgtcgtcgtgacgtaaatgtttaaatatggatataggatgtgtgtcggggatttcgaaaaggaaagttcgagttgtgacgttgttgttgtcgtcgtcgtcgttaggttcgcgtcgttgcgtgcgcgcgcgttttttaggcgtggagcgttggggtcgcggatgcgttagtttggggcgttgcgttttatcgggtcgatcgttcggtagatgcgttttttatttggaggtagaggtcgaggggtagtaggggaggatcgtgttgggtttgaatttgttttttgttattaattagtttgatatttagttttttttaacgttagttttttatttgtgtattttttgtggagagaaattgagagtatataaatgtttaggcgtatttagtaaattatagagattattgttatttattttttttgtttacgtttgtgtgtttttttattttaagttttttttttttaaatttgtgttaggaaaaataatttaaattaaaaaggattgtaatatttgttaatagtaggaggaaagttaattagtataatagggtatattttaaattgaaaagtaaaagttttttttttttatttattttatttttagtttttgaggtagttatatttaagttttttgggtatttttttagaagaatttatgtatatttaattatatatattgttttgtaatattattattattattatttttttatttgaaataatttagagattgtgttatgttttgatataaagattttgttatttttttttaaggttgtatagtattttattgtaagggaggattttgagttagtcgatttattttttatttatgagtatgtaggtagtttttaattttttatttatattaatgttgttggagttaatatttttgattatataaatgtgaatgtgtttgtgagataaattttaacgagtgtaattgtgtgttaaagtatatgtaaaattttgatagataattgta

SEQ ID NO: 75 - DNA, 4001 bp, Artificial Sequence
  chemically treated genomic DNA (Homo sapiens)
ggtttattgtaatttttgtttttcgggtttaagtaatttttttgttttagtttttttagtagttgggattacgggtgtttgatattatatttggttaatttttgtatttttagttgaggcgggttttattatgttggttaggttggttttgaattgttgattttgtgattcgttcgtttcggttttttaaagtgttgggattataggtgtgagttacggtatttggttttcgttgattttttggggggtaggttttaattttatttaggagtgtttttgtttttaggattttgttttttaggaattttaatttttaattttttagagtaaagatagtatgaggtaggattagttatagggagcgttagataagtgtttgttgagtgaatgaatgaatgagtggatgaatgaagtttagttacgagttttcgaataaaagggattagttgaggttatggaatttatttttttgtttagagttggttatagttttttatgtttttttggattttggtggttaggatttgattttagttttgaggttttttttaggtgggtttttttttttttattagtttgtagttttagttgttttttttgtttatagtagaaaagttaatattttttttggtttttatgaatattatagtaaaatgatttgtgtttttaaagtttagtttttttagatttataatgttatagtttatttaagtgatattgggatttttcgattataaatatttggtgtattaggtttgatattagattagggtttgggtttagggtttttagttgagaattttagtttagttgtttattgagtgattttgagtaagtttttagatttttagggtagaagttaaatcggatttatttttatgttttgtagtatttgtaatttggtgaatatttattgatttaaatttggttgtaatagtttttatttttttagaggaggtatatgagagttaaatgaggtaatgaattgcgtagttatttgtaaatatgacgaggttttgtaaatagaattgggataatataaatattcgttagaataatttttttattttttgaaagagtatatattttttattttatttcggttttttttttagggggaggatgggtggttaaatataagatggagatgttattttagaggggttttttataggtggagggtagggaaggaatttttttttagattattttattatttaaggataggtataattattttgggttttattttagtttttttagtcgtagttttatattggttttttacgttgatattttagttgttttttttatttatagttttgtgtgttaacgtggtttttgtttttttttgttcgtagttttttgttatgttggtagggtttaaaaggaagataggtattggttggataggaagggagaggattttgaagttaagagggaattttagggtttttagtttagttttattttttatagtttagagaagtggatggaaaggttattcgtttgaataagaggagcgtttttttttttatttggttatttgtttgtttttaaggttttgtttaatttattattgttggttggaataagattttaattattttttaatgttttttttttagagtttaaaaattttttggatattattgggtagttgggagttttggataagttgttttatttttttgaatttttatttttttatttgtgtatttattttataggattgttatagagattaaatgaaagtatggataaaaatttagtatataggaagtatatcgtatattttttaaaagttaagataagataggtttatatagtaggaatatgggtaattttaaattacgagaaaattaaatatgttttgtgtttgattttggaatgttacgtattttttttttttatatttgatttttatttttttaattgttttttttttgataaataaaatgagtattttttttaagtatagtaaagagaggaggttgttggaagaattatattggaattaaaatatgaaggagttttgtaagattaaaaggatgtatttgttgtaatttgtaaaatttatatttttaagaaaggattttagaaaaattttgatttttttggggttttttttaggttttttttttttttatatttttgttttagattttattttttgggtaaaatttgggtgttggaggtagttgggtggtatattttttttttgaaacggagttttatattgttatttaggttggagagtatttgtaattatagtttattgtaagttttaattttttgggtttaggtgatttttttgttttagttttcggagtagttgggattataggtacgtgtaattatatttaattaatttttgtattttttgtatagagttttgttttgttgtttaggttgtgtaatgattttttaattaatttttgtataatataattaatagtgtaggttgaggggtgaggatatgaggaggttttatttagagaatttagtttttaaatttagttttgtagtaattgttattttttgattaatttttagtttaaggtgaggaagggtagtagtttagtttgatagtttagtatggttttattttttttattagaagatgagaggtgaagatgtttgtttgggaaatagggagggtaaggatgtattttttggaagagaggaatttttttttttagtaagaaggcgtggttatagaaggttatttttttttgtttatggtagatttggtttagtattttaagggagtttttgtagaggatagagtttagtttgtgtttttaagttagtagagagattgttgtttggtaatataaagtttagatatataaatataaagattatataattgaggaatattttggcgtagatttgtagagataatacggttatgtatttatttatagagggtttttcgggtaatatatagttacgatgatatttattttttttttagattttttgatttatggagattatttacgatttttagaatatttttattttgttttttttgtagtttagtgatttagggagtagtgttttttattgttttaggtgtatttatttatatagcgatttcgaatgtatggttgggggtcgtattgtttggggttttattttgattttattatttattagttgttatttaatttttggattgttatttagtttagaatgttggtagaatttttattataggggtgttttaggattaaaggagaatgtatgtaaaatattataaatagtttttggtagagtatatttggtttaggttatatgttagtttttatgattaatgtatataggtggatagatgggttaggatatatattgtttttatttatttttttttacgtatagtattaaggaaaaggtagtagaataacgtagttttttttaggtttttatttggttttattttttagtttttttttttgggaatttttttattttatattttaagaaatttatttttatttttttatggtttacgcgttttaaaagttatagagtatagtttttaagttggttttaagaatttgtttaaagtaaacgtttttttcgtttttaatttagattttagtaagaggttatttttcgggttattttttttttttcggttttggttgggataggttgttatgttattttttattttattatatatatatatattcgatttcgttagaagtaggagtaattaaattaaaatcgtttgaaggggagcggggaggggttggaggaggggtagggtagaggatttttttaaggaatttagtttaggttagttcggaggcggaggttgttaattggaaaggttttgagaaagtttgagggggtttaagaaggggggaaacgcgcgcgcgcgttttacgtaatatattttttgcgggaaaattttttgaataattttagagaatttttttgataagttttcggagtttttcggagtttggaaagcgttagttttttgg

SEQ ID NO: 76 - DNA, 4001 bp, Artificial Sequence
  chemically treated genomic DNA (Homo sapiens)
ttaagagattggcgttttttaggtttcgaggggtttcgggaatttgttaaagaagttttttgaaattgtttagaaagttttttcgtaaagggtgtattgcgtagagcgcgcgcgcgcgttttttttttttttgagtttttttaagtttttttaaagtttttttagttggtagttttcgttttcggattggtttgggttggattttttgggggggttttttgttttgttttttttttagttttttttcgtttttttttagacgattttggtttggttgtttttgtttttggcggggtcgggtgtgtgtgtgtgtggtggagtggagggtggtatagtaatttgttttaattagagtcggggaggaaagggtggttcggagggtggttttttgttggggtttgggttgggggcgggggagacgtttgttttgaatagatttttggggttagtttagggattgtgttttgtgatttttggagcgcgtggattatggaggggtgggggtgggttttttggggtgtaaagtgggagagtttttagagaaggaagttaagaaataaggttagatgggagtttagggagggttgcgttgttttgttgttttttttttggtgttgtgcgtggggaagggtgagtgggggtagtgtgtattttgatttatttgtttatttgtgtgtattaattataaaagttaatatatagtttgggttaggtatattttgttaggaattgtttgtggtgttttgtatgtatttttttttaattttaaaatatttttatagtggaagttttgttagtattttggattgagtagtagtttagaggttgagtagtagttagtaagtggtggggttaagatgggattttaggtagtgcgatttttaattatgtattcgaaatcgttatatggatgagtgtatttggagtaatgagggatattgttttttgagttattgggttgtaggggagataaaatgaaagtgttttgggagtcgtgggtggtttttataggttagagggtttggggagggagtgggtgttatcgtggttgtgtgttgttcgaggggttttttgtgagtgagtgtatggtcgtgttatttttgtaggtttacgttagggtgttttttagttgtgtggtttttgtatttgtgtgtttgggttttgtgttgttaaatagtagtttttttgttgatttggggatataggttgaattttgttttttgtaggaatttttttaaggtgttgggttagatttgttataaatagagggaggtagttttttatggttacgtttttttgttgaggaagaaggttttttttttttagggagtatatttttgttttttttgttttttagataagtatttttattttttattttttgatgagaagggtgaggttatattgagttgttaggttgagttgttgtttttttttattttgggttgggagttgattagggaatggtagttgttgtagagttggatttgagggttgggttttttggatggggtttttttatgtttttattttttaatttgtattattgattgtgttgtgtaggagttagttaaaaagttattgtatagtttgggtaataaggtaaaattttgtataaaaaatataaaaattagttggatgtgattatacgtgtttgtagttttagttatttcggaggttgaggtaggaggattatttgagtttaggaagttgaggtttgtagtgagttgtgattgtaaatgttttttagtttgggtgatagtgtgagatttcgttttagaaaaaaagtatattatttagttgtttttagtatttagattttatttaaggggtgaggtttggggtaggaatgtgggggaaggggaggtttagggggagttttagaggggttaggatttttttgaaatttttttttagaggtatgggttttataaattgtagtaaatatatttttttaattttgtagaatttttttatattttaattttagtatgatttttttaatagttttttttttttattatatttggggaaagtatttattttatttgttaagaaaaaaataattgaaaagatagggattaaatgtaaaaagaaaaaatacgtggtattttaaagttaaatataaagtatgtttaattttttcgtggtttgggattatttatatttttgttgtatgaatttgttttgttttaatttttaagaaatgtacggtgtattttttatatgttaggtttttatttatgtttttatttaatttttgtgatagttttgtgaagtaggtgtatagatgagaaaatggaagtttagagaaatgaagtaatttatttaaggtttttagttatttagtaatgtttagggaatttttggattttgaagaggaggtattaagaggtggttagagttttattttagttaataataatgggttgaataaagttttaggggtaggtaggtggttagatgggaggagaagcgttttttttgtttaggcgaatgatttttttatttatttttttaggttgtagaaagtggagttgagttgggggttttgaggtttttttttgattttagagttttttttttttttgtttagttaatgtttgttttttttttgggttttattagtatgatagggggttgcgggtaggaggggatagaggttacgttgatatatagggttgtgggtgagagagatagttgaagtgttagcgtgaggggttagtgtggggttgcggttgggagggttggggtggggtttagggtagttgtgtttgtttttgggtgatggaatgatttggaaagagattttttttttgttttttatttgtgagaagtttttttagagtgatatttttattttatgtttggttatttattttttttttgggaagagagtcgaggtggggtaagggatgtgtatttttttaaggagtgggagaattattttagcgaatgtttgtgttgttttagttttgtttataaagtttcgttatgtttatagatggttgcgtaatttattattttatttaatttttatgtattttttttgagggagtaagagttgttatagttaagtttaggttagtaaatatttattaagttgtaggtattgtagggtatagagatgaattcgatttagtttttgttttggaggtttgggaatttgtttaagattatttagtgagtagttgagttagggtttttaattaaagattttgggtttaggttttggtttgatgttaggtttgatatattaggtgtttgtggtcggggaattttagtgttatttgaatgggttgtgatattatgggtttgggagagttgagttttggggatataggttattttattgtagtatttatggaaattaagggaagtattggtttttttgttgtgagtaagaggagtagttggggttgtaagttggtggggaggagagaatttatttgagagaaattttaggattggggttaagttttgattattagagtttagagagatatgaaggattgtgattagttttgagtagagagatggattttatgattttaattggttttttttgttcggagattcgtgattggattttatttatttatttatttatttatttatttagtagatatttatttagcgttttttgtggttggttttgttttatattgtttttgttttggagaattggaggttggggtttttgaggggtagggttttggagataaggatatttttgggtagaattaggatttattttttaggaaattaacggggattaggtgtcgtggtttatatttgtaattttagtattttgggaggtcgagacgggcggattataaggttagtagtttaggattagtttggttaatatggtgaaattcgttttaattaaaaatataaaaattagttaggtgtggtgttaggtattcgtaattttagttattgaggaggttgaggtaggagaattgtttgaattcgggaggtagaggttgtagtgagtt

SEQ ID NO: 77 - DNA, 4858 bp, Artificial Sequence
  chemically treated genomic DNA (Homo sapiens)
ggaatttttttttttttttttttttttgaaatagggtttcgttttgttatttaggttaaagtgtagtgtcgcgattttagtttattataatttttgttttttaggtttaagggatttttttattttagttttttaagtagttgggattataggtatgtgttattatattcggttaatttttgttttttttatagagatagggttttattatgttgtataagtcggttttgaatttttgagtttaagtgagttatttgttttggttttttaaagtgttgggattatatatgtgaattatcgtattcggttttaaaaatgtttttttaagcgtaattacgtaatgttagttgtagtttagatttttggatgttaatttaaaatagttttataggaatttagtgtggtggtttacgtttgtaattttagtttgaggtaggtggattatttgaggttaggagttcgagattagttgggttaatatggtgaaattttgtttttattaaaaatataaaaaaattagttgggtatagtggtaggtattcgtaattttagtttttcgggacgttgaggtagaagaattgtttgaatttaggaggtagtggttgtagtgagtttagatcgtgttattgtattttagtttgggtaataagagtaaaattttgttttaaaaaaattaattaatttaggttgggcgtagtggtttatgtttgtaaattttagtattttgagaggttgaagcgggtggattatgaggttaagagatcgagattattttggttaatacggtgaaattttatttttattaaaaatataaaaaaaaaattttaaaaaataaaaaaataaaaataaataaataaattaaaaaaatataataattagttaggcgtagtggtaggcgtttgtaattttagttagtcgggaggttgaggtaggaggagaatggagtgaatttaggaggtagagtttgtagtgagttgagatcgcgttatagtattttagtttgggtaatagagcgagattttattttaggaaaaaaaaaattaattaattaaaaaaatagtaagataaataatattttttttattttagtaaaaggatgaagttagttttttaatgaataaaaataagagattgttgaatgttaagttttatagatagtttagataatatagggagatattatttttatatatatatatatatatatatatatatatatatatatatatatatatatatatataaaatagttgcgtatggtggtatgggtttgtagttttagttattggggtagggttagggggtgggaggttgaggggagaggatgttttaatagggaggttgaggttgtagagagttatgattacgttattgtattttagtttgggtgatatagtaagattttgttttagaaaaaaaaaaaagaaaaaagttaagaatgtatttttgaggaattttattaataaaatgtattaaatatagttaaagagttttttgttatatgttaagtggaaagttatgaagaaagagaagaatagaagtaggaggatattggtttttattttttatttttttaagaagtaagatttattattttttaaaaagtttaaatattggtaaggtaagatataatttttatttataatattgtatttttgtttttaggtaataaattaaatgttagataaaagtataatatttattatttaatttttaggttttagtatagaatttataaatattttgttggttaaggtaaaaaggtgtattgtatttttagagagtttgtagagttttgagtattaattttataatttttatattttaatttatataaagtattattaggttaagaaatagattatatagtaggtataatatttttgggtatgtaaatatgttaaggattaaagtaagaaaagagtaattataggggttatattatatttgttaaaaagtgatttgtttaaaaattaaaaagaagtcgggtgtagtggtttatatttgtaattttagtattttgagaggttggggtgggtggattatttgaggttagtagtttaaaattagtttggttaatatagtgaaattttatttttattaaaaatataaaattaggcgtggtggtaggcgtttgtaattttagttattagggatgttgaggtaggagaatcgtttgaattcggaaggtagaggttgtagtgagttaaaatcgtattattgtattttagtttgggtaataagagtaaaattttgttttaaaaaaaaaaaaataaaaataaaaataaaaaagaaatttagtttatttttttgtgtaatttttaataaattgttgagaagtgattttatataggaattttgtataatttattttgatgcgttcgaggtggtcgttagttgatttcgcggagtttatttttttggttttttcgttttaacgtcgttcgttttttagttaggatgtttgttcgtggttcggttatcggtatcgatttgggtattatttattcgtgcgtcggggttttttaatatggtaaggtggagattatcgttaacgattagggtaatcgtattatttttagttacgtggtttttacggatatcgagcgttttatcggcgacgtcgttaagaattaggtggttatgaattttattaatattattttcgacgttaagaggttgattggacggaaattcgaggatgttatagtgtagtcggatatgaaatattggtcgtttcgggtggtgagcgagggaggtaagtttaaagtgtaagtagagtataagggggagattaagattttttttttagaggagatattttttatggtttttacgaagatgaaggagatcgcggaagtttatttggggggtaaggtgtatagcgcggttataacggtttcggtttattttaacgattcgtagcgttaggttattaaggacgtaggtattattacggggtttaatgtgttgcgtattattaacgagtttacggcggcggttatcgtttacggtttggataagaagggttgcgcgggcggcgagaagaacgtgtttatttttgatttgggcggtggtattttcgacgtgtttattttgattatcgaggatggtattttcgaggtgaagtttacggtcggcgatatttatttgggcggtgaggatttcgataatcgtatggtgagttatttggcggaggagtttaagcgtaagtataagaaggatattgggtttaataagcgcgtcgtgaggcggtcgcgtatcgtttgcgagcgcgttaagcgtattttgagttcgtttacgtaggcgagtatcgagatcgattcgttttacgagggcgtggatttttatacgtttattacgcgcgttcgtttcgaggagtttaatgtcgatttttttcgcgggattttggagtcggtggagaaggcgttgcgcgacgttaagttggataagggttagatttaggagatcgtgttggtgggcggttttattcgtatttttaagatttagaagttgttgtaggatttttttaacggtaaggagttgaataagagtattaatttcgacgaggcggtggtttatggcgtcgcggtgtaggcggttatttttatcggcgataaattagagaatgtgtaggatttgttgttattcgacgtgatttcgttgtcgttgggtatcgagatagttggcggtgttatgattttatttattaagaggaatattacgatttttattaagtagacgtagatttttattatttattcggataattagagtagcgtattggtgtaggtatacgagggcgaacgggttatgattaaggataataatttgttgggtaagttcgatttgatcgggattttttttgcgtttcgcggggttttttaaatcgaggttattttcgatattgacgttaatggtatttttaacgttatcgtcgtcgataagagtatcggtaaggaaaataaaattattattattaatgataaaggtcgtttgagtaaggacgatattgatcggatggtgtaggaggcggagcggtataaatcggaagatgaggcgaatcgcgatcgagtcgcggttaaaaacgttttggagttttatatttataatattaagtagacggtggaagacgagaaattgaggggtaagattagcgagtaggataaaaataagattttcgataagtgttaggaggtgattaattggttcgatcgaaattagatggtagagaaagatgagtatgaatataagtagaaagagttcgaaagagtttgtaattttattattagtaaattttattaaggtggttttggcggcggtagcggcggcggcggtttaggagttttcgggggatttattatcgaagaagtggattaagtttgtatttaagttagcgtaaatttttttgtttttttttttttttttttttttttgtttgtttttttgaaatgtttttgtgttaagtacgagatttattgttggaagtttttggtatatgtaaatgaaaggagaggtgtaataatttagtttaattataaaagttttaaagtttgttttttaaaaatattattcgaggtttttttttaatgtattttgcgtgtttgttgatttgagtatttttgattagttcgtgtatggagatttgtttgagatgagaaattttaagtttgtatatttgttttgtagaagtttggaaatagtaaaatatataggagtttaaattgtttatttttatgtattattttaaaattaaattgaatattgtagtaatgttaaggataggtatattttttgtaaataaatgtataaaatgtaaatgtaaagtaaagttgaaattgattttaaaaaaaaaaaa

SEQ ID NO: 78 - DNA, 4858 bp, Artificial Sequence
  chemically treated genomic DNA (Homo sapiens)
ttttttttttttgagattaattttagttttattttatatttgtattttatgtatttgtttgtaaaaagtatatttgtttttaatattattgtaatgtttagtttagttttaaagtagtatataaaaataaataatttaagtttttatatattttattgtttttaagtttttatagaataggtgtgtaaatttaaggttttttattttaaataaatttttatgtacgaattaattaaaaatgtttaagttagtaaatacgtaaaatgtattaaagagaaatttcgaataatgtttttaaaaaataaattttggaatttttataattaaattaagttgttgtatttttttttttatttgtatatattaaagatttttaataatagatttcgtatttggtataaggatattttaaagaaataaataaaaaaaaagagagagagagaaaggtaaagaggtttacgttgatttgagtgtaagtttagtttattttttcgatggtgggtttttcggaggtttttgaatcgtcgtcgtcgttgtcgtcgttaggattattttggtaaagtttgttgatgatggggttgtaaattttttcgagttttttttgtttgtgtttatatttatttttttttgttatttggtttcggtcgagttagttgattattttttgatatttgtcgaggattttgtttttgttttgttcgttaattttgttttttagtttttcgttttttatcgtttgtttgatgttgtaggtataggattttagggcgtttttggtcgcgattcggtcgcgattcgttttatttttcgatttgtatcgtttcgttttttgtattattcggttaatgtcgtttttgtttagacgatttttgttattggtgatggtgattttgttttttttatcggtgtttttgtcggcggcggtaacgttaaggatgttattggcgttaatgtcgaaggtaatttcgatttgggggatttcgcgaggcgtagggggaatttcggttaggtcgaatttgtttagtaggttattgtttttggttatggttcgttcgttttcgtatatttgtattagtacgttgttttggttgttcgagtaggtggtgaaggtttgcgtttgtttggtggggatcgtggtgttttttttgatgagtggggttatgatatcgttagttgtttcgatgtttagcgataacggggttacgtcgagtagtagtaggttttgtatattttttgatttgtcgtcgatgaggatggtcgtttgtatcgcggcgttataggttatcgtttcgtcggggttgatgtttttgtttagttttttgtcgttgaagaaattttgtagtagtttttggattttggggatacgagtggagtcgtttattagtacgattttttggatttggtttttgtttagtttggcgtcgcgtagcgttttttttatcggttttagggtttcgcgaaagaggtcggtattgagtttttcgaagcgggcgcgcgtgatggacgtatagaagtttacgttttcgtagagcgagtcgatttcgatgttcgtttgcgtggacgagtttagggtgcgtttggcgcgttcgtaagcggtgcgcgatcgttttacggcgcgtttgttgggtttaatgttttttttgtgtttgcgtttgaattttttcgttaggtggtttattatgcggttgtcgaagtttttatcgtttaggtgggtgtcgtcggtcgtggattttatttcgaagatgttattttcgatggttaggatggatacgtcgaaagtgttatcgtttaggttaaagatgagtacgtttttttcgtcgttcgcgtagttttttttgtttaggtcgtaggcgatggtcgtcgtcgtgggttcgttgatgatgcgtagtatattgagtttcgtgatggtgtttgcgtttttggtggtttggcgttgcgagtcgttgaaataggtcgggatcgttatgatcgcgttgtgtattttgttttttaggtaggttttcgcgattttttttattttcgtgaggattatggaggatattttttttgggaagaaggttttggttttttttttgtattttatttgtattttgggtttgtttttttcgtttattattcggaacggttagtgttttatattcgattgtattgtggtattttcgaattttcgtttaattagttttttggcgtcgaagatggtgttggtggggtttatggttatttggtttttggcggcgtcgtcgatgaggcgttcggtgttcgtgaaggttacgtagttgggggtggtgcgattgttttggtcgttggcgatgatttttattttgttatgttggaagatttcgacgtacgaataggtggtgtttaggtcgatgtcgatagtcgggttacgggtagatattttgattgaaaggcgagcgacgttaggacgggaaaattagggagatgaatttcgcggagttaattaacggttatttcgaacgtattagaataaattatataagatttttatgtaagattattttttagtaatttattaggaattgtataaggaggtaaattggattttttttttgtttttatttttatttttttttttttgagatagagttttgtttttgttgtttaggttggagtgtagtggtgcgattttggtttattgtaatttttgtttttcgggtttaagcgatttttttgttttagtatttttagtagttgggattataggcgtttgttattacgtttaattttgtatttttagtagagatggggttttattatgttggttaggttggttttgaattattgattttaggtgatttatttattttagttttttaaagtgttgggattataggtgtgagttattgtattcggtttttttttaatttttaaataagttattttttggtaaatatagtatggtttttatagttattttttttttattttgatttttaatatgtttgtatatttaagagtgttgtgtttgttatataatttgttttttagtttgatggtgttttgtgtagattgagatatgaggattatgggattagtgtttagaattttgtaagttttttggaaatatagtatatttttttgttttagttagtagaatgtttgtgagttttgtgttgaagtttgggggttgagtggtagatattgtgtttttatttgatatttgatttgttgtttgaggatagagatgtagtgttatgggtgggagttgtgttttgttttattagtgtttagattttttaaaagataatggattttattttttgaaagaataggagatgaaaattaatgtttttttgtttttgtttttttttttttttatagttttttatttggtatatagtagaaaattttttggttatatttggtgtattttgttggtggaattttttaagaatgtatttttgattttttttttttttttttttttgagatagagttttgttgtattatttaggttggagtatagtgacgtgattatggttttttgtagttttaatttttttgttaaggtattttttttttttagttttttattttttggttttgttttaatagttgggattataggtttatgttattatacgtagttattttgtgtgtgtgtgtgtgtgtgtgtgtgtgtgtgtgtgtgtgtgtgtgtgtgtgtgtgtagagatggtgtttttttgtgttgtttggattgtttataaaatttgatatttaatagttttttgtttttatttattgagaaattggttttatttttttattgaaatgggagaagtgttatttattttattgtttttttaattaattaatttttttttttttgagatggagtttcgttttgttgtttaggttggagtgttgtggcgcgattttagtttattgtaagttttgttttttgggtttattttattttttttttgttttagtttttcgattagttgggattataagcgtttgttattacgtttggttagttgttgtgtttttttggtttgtttgtttgtttttgtttttttgttttttggggttttttttttgtatttttagtagaaatggggttttatcgtgttagttaggatggtttcgattttttgattttatgatttattcgttttagttttttaaagtgttgggatttataggtatgagttattgcgtttagtttaaattaattgatttttttgagatagagttttgtttttgttgtttaggttggagtgtaatggtacgatttgggtttattgtaattattgttttttgggtttaagtaatttttttgttttagcgtttcgagaagttgaaattacgggtgtttgttattatgtttagttaatttttttgtgtttttagtagagatagggttttattatgttggtttagttggtttcgaatttttgattttagatgatttatttgttttaggttgggattataggcgtgagttattatattgggtttttatgggattattttaagttaatatttaggaatttaaattataattagtattacgtagttacgtttaagaaagtatttttggggtcgggtacggtggtttatatgtgtaattttagtattttgggaggttaaagtaggtagtttatttgagtttaggagtttaagatcgatttgtgtaatatggtgaaattttgtttttatgaaaaaagtaaaaattagtcggatatggtggtatatgtttgtggttttaattgtttgggaggttgaggtgggaggattttttgaatttgggaggtagaggttgtaatgagttgagatcgcggtattatattttagtttgggtgatagagcgagattttgttttaaaaaaaaaaaaaaaaaaaagaatttt

SEQ ID NO: 79 - DNA, 1157 bp, Artificial Sequence
  chemically treated genomic DNA (Homo sapiens)
ggattttgttttttttgaaggttttagggaagagtgttttttgtttttttcgaaggttttagggaagggtttgtttttttaggtttttggtggtttgtaggtgtagttttttaatttttttttttaagcggtttgttgtttataaggatacgagttatattggatgaggggtttattaattgatggtttttgtaaagtttttatttttaaataaggttatattgtgaggtattgggagttaggattttaatatagtttttttggtggatataatttaatttttaataacgtttatataattttaagtagggtttggtattttgtgtgttttttggagagcggttgagttaggttttggtagtgtttaggttatcggtgattgtagtttttggacggtatcgtttattataggttttggaggttgtttttacggttttttgatagggtttttgttggtttgggggtttttgattaggggagcggttttaggaggggagagattcgcgtttcgggtttagcgtagtcgtttcgagtaggatcgggatttttattaagcgggcgtcgttttacgattttcgcgcgtttttaggattattcgggtacgtggtaggtcgtttgtacgttcgcggattatttttgtgataggaaaaggtacgggttatttggtaaattaaggtatagagttttaggcggaagttgggaaggcgtcgttcggtttgtatcggtcgaagggttattcgggttaggcgtatagggtagcggcgttgtcggaggattagggtcggcgtgtcggcgtttagcgaggatgcgtagattgttttaggttcggcgtcgtcgtattgggtatgcgtcgattcggtcgggcgggaatatttcgtttcgttcgggtttcgttttagtttcgttttcgcgcgtttcggtttcgttttcgcgcgtttttttgttttttttaggttttcggtttcgtttcgttttagatttcgttttacgtcgttattttcgtgtttttcggtttcgttttcgcgtttcggatatgttgggatagttcgcgtttttagaacgttttgcgtttcgacgttcgtaggttttcgcggtgcgtatcgtttgcgatttggtgagtgtttgggtcgtttcgttttcggaagagtgcggagttt

SEQ ID NO: 80 - DNA, 1157 bp, Artificial Sequence
  chemically treated genomic DNA (Homo sapiens)
gagtttcgtattttttcgggagcgaggcgatttagatatttattaagtcgtaaacggtgcgtatcgcgaggatttgcgggcgtcgggacgtaaagcgttttaggggcgcgggttgttttagtatattcggggcgcgggggcggggtcgaggggtacggggatggcggcgtggggcggggtttagagcggggcggagtcgaggatttgagaaaagtaagagagcgcgcgggggcggggtcggggcgcgcgggggcggagttggggcggagttcgggcggggcggggtgttttcgttcgatcgggtcggcgtatgtttagtgcggcggcgtcgggtttgaggtagtttgcgtattttcgttggacgtcggtacgtcggttttggtttttcggtagcgtcgttgttttgtgcgtttgattcggatggtttttcggtcggtataagtcgggcggcgtttttttagttttcgtttgaggttttgtgttttagtttgttaaatggttcgtatttttttttgttatagggatagttcgcgggcgtgtaagcgatttgttacgtgttcgagtggttttgaaagcgcgcgggggtcgtaggacggcgttcgtttagtgagaatttcggttttgttcggggcggttacgttgagttcggagcgcgagtttttttttttttggggtcgtttttttagttagggatttttagattagtagagattttgttagggggtcgtgggggtagtttttagggtttgtggtgggcgatgtcgtttaggggttgtagttatcgatggtttagatattgttagagtttgatttagtcgttttttagagagtatatagggtgttaggttttgtttggggttgtgtggacgttattaggagttgaattgtgtttattagagaagttatgttggagttttaatttttagtattttataatgtgattttatttggagatggggattttatagaagttattaattagtgggttttttatttagtatgattcgtgtttttataggtagtaggtcgtttggggaggaggattggagggttgtatttgtaagttattagaagtttaagaggatagatttttttttggagttttcggagggagtagaggatatttttttttggagtttttagagggagtaggattt

SEQ ID NO: 81 - DNA, 5881 bp, Artificial Sequence
  chemically treated genomic DNA (Homo sapiens)
gggagatgaggtgggaggattgtttgagtttaggagtttaagattagttcggggtaatatagtgaaattttgtttgtataaaaataaatttcgggagcgtggttgagcggttggcgcggttgttttggagtaggggcgtaggaattttgatgtgaaattaatagtttgtgagttttggaatttttatttagagaagatgaaggatatcgatataggaaaagagtatattatttttagttttgggtatagaagtgtgagggagagaattagtatttttgggacgtatagagatcgtgaagattttaagtttaggagaattcgatcgttggaatgttaagatgttttggaaatagtagttcgagtcgagggttttttttttgatgtttttatgtatttttagtttagaattttggatgaggagtattttaagggaaagtattattatggtttgagtgttttgaagtttattcggattatttttaaatattagtatttagtggataatgttgggttttttttttgtatgattttttcgtggtttttttttttggttcgtgtggtttataagaagggggagtttttaatggaagacgtgtggtttttgtttaagtacgagttttttgacgtgaattgtagaagattagagagattgtggtaagaagagttgaatgaagttgggttagacgttgtttttttgcgaagggttgtgtggattttttgtcgtattaggtttattttgtttatcgtgtgtttgatgattacgtagttggttggttttagtggattagtttttatggtgaaatattttttggagtatatttaggtaatagagtttaatttgtagtatagtttgttgttagtgttgggtttttttttgacggaaatcgtgcggttttggtcgtttgtattgatttgggcgttgaattatcgaatcggtgttcgtttgcggggggttattttaattatggtatttaagaagatttttaagttaaagaatattaaagagaaatttttgggtgagtttattaatatttgttttaacgatgggtagagaatgtttgaggtagtagtcgttggtagtttgttggttggaggattcgttgttgttattttaggtatgatttataatgtaattattttgggattaataggttttttgggattagttgtttttatttttttttatttagtaatgatgtttgtattacggtttatagtatattttaggagaaaatgcgtggtcgttacggatgaacgtgtttagaagatgaatgaagtttttatttatattaaatttattaaaatgtatgtttgggttaaagtatttttttagagtgtttagaaaattcgcgaggaggagcgtcggatattggaaaaagtcgggtatttttagagtattattgtgggtgtggtttttattgtggtggtgattgttagcgtggtgattttttttgtttatatgattttgggtttcgatttgatagtagtataggtttttatagtggtgatagtttttaattttatgatttttgttttgaaagtaatatcgtttttagtaaagttttttttagaagttttagtggttgttgatagatttaagagtttgtttttaatggaagaggtttatatgataaagaataaattagttagtttttatattaagatagagatgaaaaatgttattttggtatgggattttttttattttagtatttagaattcgtttaagttgatttttaaaatgaaaaaagataagagggtttttaggggtaagaaagagaaggtgaggtagttgtagcgtattgagtattaggcggtgttggtagagtagaaaggttatttttttttggatagtgacgagcggtttagtttcgaagaggaagaaggtaagtatatttatttgggttatttgcgtttatagaggatattgtatagcgtcgatttggagatttaagagggtaaattggttggaatttgcggtagtgtgggaagtggaaaaattttttttattttagttattttaggttagatgacgtttttagagggtagtattgtaattagtggaattttcgtttatgtggtttagtaggtttggatttttaatgttattttgagagataatattttgtttgggaaggaatatgatgaagaaagatataattttgtgttgaatagttgttgtttgaggtttgatttggttattttttttagtagcgatttgacggagattggagagcgaggagttaatttgagcggtgggtagcgttagaggattagttttgttcgggttttgtatagtgataggagtatttatattttggacgatttttttagtgttttagatgtttatgtgggtaattatatttttaatagtgttattcggaaatattttaagtttaagatagttttgtttgttatttattagttatagtatttggttgattgtgatgaagtgatttttatgaaagagggttgtattacggaaagaggtatttatgaggaattgatgaatttaaatggtgattatgttattatttttaataatttgttgttgggagagatatcgttagttgagattaatttaaaaaaggaaattagtggtttatagaagaagttataagataagggttttaaaataggattagtaaagaaggaaaaagtagtaaagttagaggaagggtagtttgtgtagttggaagagaaagggtagggtttagtgttttggttagtatatggtgtttatatttaggttgttgggggttttttggtatttttggttattatggttttttttatgttgaatgtaggtagtatcgtttttagtatttggtggttgagttattggattaagtaaggaagcgggaatattattgtgattcgagggaacgagatttcggtgagtgatagtatgaaggataatttttatatgtagtattatgttagtatttacgttttttttatggtagttatgttgattttgaaagttattcgaggagttgtttttgttaagggtacgttgcgagttttttttcggttgtatgacgagttttttcgaaggatttttcgaagttttatgaagttttttgatacgatttttatagggaggatttttaataggttttttaaagatatggatgaagttgacgtgcggttgtcgttttaggtcgagatgtttatttagaacgttattttggtgtttttttgtgtgggaatgatcgtaggagttttttcgtggttttttgtggtagtggggttttttgttattttttttttagttttgtatattgtttttagggttttgattcgggagttgaagcgtttggataatattacgtagttatttttttttttttatattacgtttagtatatagggttttgttattatttacgtttataataaagggtaggagtttttgtatagatattaggagttgttggatgataattaagtttttttttttttgtttacgtgtgcgatgcggtggttggttgtgcggttggattttattagtatcgtttttattattattacggggttgatgatcgtttttatgtacgggtagatttttttagtttatgcgggtttcgttattttttatgttgtttagttaacggggttgttttagtttacggttagattggtatttgagatagaagttcgatttatttcggtggagaggattaattattatattaagattttgtttttggaagtatttgttagaattaagaataaggtttttttttttgattggttttaggagggagaggtgatttttgagaacgtagagatgaggtatcgagaaaatttttttttcgttttaaagaaagtattttttacgattaaatttaaagagaagattggtattgtggggcggataggattagggaagttttcgttggggatggttttttttcgtttggtggagttatttggaggttgtattaagattgatggagtgagaattagtgatattggttttgtcgattttcgaagtaaattttttattattttttaagagtcggtgttgtttagtggtattgttagattaaatttggatttttttaattagtatattgaagattagatttgggatgttttggagaggatatatatgaaagaatgtattgtttagttatttttgaaatttgaatttgaagtgatggagaatggggataattttttagtgggggaacggtagtttttgtgtatagttagagttttgtttcgttattgtaagattttgattttagatgaagttatagttgttatggatatagagatagatttattgatttaagagattattcgagaagtatttgtagattgtattatgttgattattgtttatcgtttgtatacggttttaggtttcgataggattatggtgttggtttagggataggtggtggagtttgatattttatcggtttttttgtttaacgatagttttcgattttatgttatgtttgttgttgtagagaataaggtcgttgttaagggttgatttttttttgttgacgaagttttttttttttagagtattgttattttttgtttggggcgggttttttatcgcgtttttttatcgaaattttgtttttttcgattttatttttcgtatagtagtttcggattggtttgtgtgttttatttttagggagagttatattttgattattgtatttattttatatttatgtaaataaaatttagtttttgtttttaattgtattttaaaaggtttagggaatcgttattataattgtattagaggtttataatgaagttttatacgtgtagttatatttatatataattttgtatatagtttatatttatagtgaaaatgtaagttgtttattttatattaaaataagtattgtgttaataatagtgtatatttttttttattatttttgtatagtttgttgtattagagatttggttttgttattagattgtaggaagagtagtattttatttttttttagttggtggttttacggtgttaggttttttgggtgtttaaaggaagacgtgtggtaatagtgggtttttcgatagttttttttgtcgtttttttatagtcgttttaggggtggttggagacgggtgggcggttggagattatgtagagcggtcgtgagtttttagggtttttgttttttgttttggtgttatttattgtttttgttaggagagtagcggggcgaagtttaggtttttttttattttttttattaatgaatggggattatagagatattttttcgagtcggggagttttttttttgtttttttttttttgttgttgtttttaaataagaattagtttatttatagagagttttattgttttaggtttttatggttggttattgtatagagttttttagttttaagatttgttggttttaagttttggagttaattgttgttttttgaggtggtatttttttatttgtttatttttatatttttatagtttagtggtagggtttaggatttcgtgggtttgttttttttttttatcgtagtcgtcgtatagtttttttttttttttttttttaaagtttgtaattttaagtagtttttgttaattagtgttttatattggcgtagaagtttttgtattgtaaagagatttattttaggttgttggttgttgtgtggtttggtgtgttttcgtaaattttttttgtgttgtggggttggtagtttaggtgggcgtggttattgttgttattagttgaatggttagcgttgtatgtcgtgattaattagatattttgtcgttttagtatgtttgttgaatattttgtggaagtaaaaatttgaaaatgtgaataaaattattttggattttgtaaaattt

SEQ ID NO: 82 - DNA, 5881 bp, Artificial Sequence
  chemically treated genomic DNA (Homo sapiens)
gagttttataaaatttaaaataattttatttatatttttagatttttgtttttataaggtgtttagtaaatatgttaaggcgatagaatgtttagttggttacgatatgtaacgttgattatttaattgatgatagtagtgattacgtttatttgagttattagttttatagtataaagggggtttgcgggaatatattaaattatatagtaattagtaatttgaggtaggtttttttatagtataaaaatttttacgttagtgtgagatattgattagtaagagttgtttaaagttgtagattttgaggggagagagagagagagattgtgcgacgattgcggtgagaaaggaaaatagatttacgaaattttgagttttgttattgaattgtggaggtgtgggaataggtaaatgaaaaagtgttattttaaaaagtagtagttggttttagggtttggaattaataggttttggagttggagagttttgtgtagtggttagttataggaatttgaggtagtgggattttttgtggatagattgatttttgtttagaaataatagtaaaaagaagaaggtaggaaagaaatttttcggttcggaggaatgtttttgtgatttttatttattgatggagggagtgaaaaggggtttgggtttcgtttcgttgtttttttgatagaaatagtaagtgatattaggatagaaggtaggagttttgagaatttacggtcgttttgtatggtttttagtcgtttattcgtttttagttatttttggagcggttgtggggaggcggtagagggggttgtcggagggtttattattgttatacgtttttttttggatatttagaaaatttggtatcgtgaaattattagttagagaagaatgaaatgttattttttttatagtttaatagtaaaattagatttttagtatagtaaattgtataaaaatgatagaaaggaatatgtattgttattagtatagtgtttattttaatataaaataaatagtttatatttttattgtaaatataggttatgtatagaattatatatagatatagttatacgtataaagttttattataggtttttgatataattataataacggttttttgaattttttagagtgtaattaagaataaaaattaaattttgtttatatgaatatggaataaatataataattaaaatatgattttttttaaaagtgaaatatataagttaattcggaattgttgtgcgaaagataaaatcgagaaaggtaaggtttcggtaggaggacgcgatgaggggttcgttttaggtagggaatggtaatgttttaaagaaaagagatttcgttaatagggaggagttagtttttgatagcgattttgttttttgtagtagtaaatatggtatagaatcgggaattgtcgttggatagaaggatcgatggggtgttaaattttattatttgtttttgggttagtattataattttatcggagtttagaatcgtgtgtaggcgatgggtaatggttagtatggtatagtttgtaaatgtttttcggatggttttttgaattaataagtttgtttttgtgtttatggtagttgtggttttatttaaaattagaattttatagtggcggagtagggttttagttatgtataagagttgtcgtttttttattgagaagttatttttattttttattattttagatttaagttttagaggtagttgagtaatatatttttttatgtgtgttttttttagggtattttaaatttggtttttagtgtattggttgaaggggtttaaatttgatttgatagtgttattgaatagtatcggtttttgaggaatgatagagagtttgtttcggaggtcggtaaggttaatattattgatttttattttattaattttgatgtagtttttagataattttattagacggaagagggttatttttagcgaggatttttttgattttgttcgttttataatgttaattttttttttaggtttgatcgtgaaggatattttttttaggacgagagggaggttttttcggtattttatttttgcgtttttaaaggttattttttttttttggggttagttaggggagggagttttgtttttaattttggtaggtgtttttaaggatagagttttaatgtagtgattgattttttttatcgaggtgaatcgagtttttgttttagatgttagtttgatcgtaaattggaatagtttcgttaattggatagtataagagatggcgagattcgtataggttgggggaatttgttcgtgtataagaacgattattagtttcgtggtggtgatgagggcgatgttgatgaggtttagtcgtatagttagttatcgtatcgtatacgtaaataaaaaaaaaggagtttggttgttatttagtagtttttggtatttgtgtagaaatttttgttttttattgtaggcgtggatggtggtaaggttttgtatgttggacgtgatgtgggagaggaaaggtgattgcgtgatattgtttagacgttttagttttcgaattaggattttggagataatgtgtaggattgaaaagaggatgataaggggttttattgttataaggaattacgggaagatttttgcgattatttttatatagaagaatattaggataacgttttggatgaatatttcggtttggaacggtagtcgtacgttaattttatttatgtttttggaaaatttgttgagaattttttttgtgggggtcgtgttaaaaaattttatagggtttcgaaggatttttcggaaaagttcgttatgtagtcgggaggaagttcgtagcgtgtttttgataaagataatttttcgaatggtttttaggattagtatgattgttatggagagggcgtagatgttggtatagtattgtatatgaggattgttttttatgttgttatttatcgaggtttcgttttttcgagttatagtggtgttttcgtttttttgtttgatttagtaatttaattattaggtgttgaaggcggtgttgtttatatttagtatgaaaagggttataataattaggaatgttaaggggtttttagtagtttggatgtagatattatatattgattagggtattgaattttgtttttttttttttagttgtataagttgttttttttttggttttattgttttttttttttttattgattttgttttaggatttttgttttgtgattttttttgtgaattattggtttttttttttgaattgattttaattggcggtgttttttttagtaataggttattaaaaatggtagtatagttattatttaaatttattagttttttatgggtgttttttttcgtaatatagtttttttttatgaagattattttattatagttaattaggtattgtaattggtgggtaataaatagaattgttttggatttgagatgttttcggatagtattattgaagatgtggttgtttatatgggtatttaaggtattgagggggtcgtttaggatgtagatgtttttgttattatataaggttcgggtaaggttgattttttggcgttgtttatcgtttaggttggtttttcgttttttaattttcgttaggtcgttgttgggaagaatggttaggttaggttttaggtagtagttgtttagtatagagttgtatttttttttattatatttttttttaaataggatgttgttttttagagtagtattgaggatttaggtttgttgggttatataagcgaaggttttattgattgtaatgttgttttttagaagcgttatttggtttaaaatggttgaaatgagagaggtttttttattttttatattgtcgtagattttaattagtttatttttttggatttttagatcgacgttgtgtagtgttttttgtaagcgtaggtggtttaggtggatgtgtttgtttttttttttttcgggattgggtcgttcgttattgtttaggaggaggtggtttttttgttttgttagtatcgtttgatgtttagtgcgttgtagttgttttatttttttttttttgtttttggaagtttttttgtttttttttattttgggggttagtttgggcgagttttggatattggagtgggaggagttttatgttaaggtggtattttttatttttattttgatgtgaggattggttggtttgttttttattatgtgaattttttttattagaaataaatttttaaatttgttaatagttattgaggtttttgagagggattttattgaaaacggtgttatttttaaagtaaaagttatggaattgaagattgttattattgtgaaagtttgtgttgttgttagatcgaagtttagggttatatgaatagagaaggttattacgttggtaattattattataatgggagttatatttatagtgatgttttggaagtattcggttttttttaatattcgacgttttttttcgcggattttttgaatattttgagaaaatgttttgatttaggtatatattttgataaatttaatgtaagtaagaattttatttattttttggatacgtttattcgtggcggttacgtatttttttttgaaatatgttgtgagtcgtgatgtaaatattattgttgggtaaaagaggataaaaatagttgattttaggaagtttgttggttttagaataattatattataaattatgtttaagatggtaataacgggttttttagttagtaggttgttaacggttgttgttttaaatattttttgtttatcgttggagtaaatgttgatgagtttatttagggatttttttttaatgttttttaatttaaggatttttttaaatgttatggttaggatggtttttcgtaagcggatatcggttcggtaatttaacgtttaagttagtgtaagcgattaagatcgtacgattttcgttaggaggaggtttagtattaataataagttgtattgtaggttagattttgttgtttgggtatattttaagaggtgttttattatgaaggttggtttattgaagttagttagttgcgtgattattaggtatacgatggataggatgagtttggtgcggtagaagatttatataatttttcgtagggaagtagcgtttggtttaattttatttagttttttttgttatagtttttttagttttttgtagtttacgttagaagattcgtgtttggatagagattatacgttttttattgagagttttttttttttgtgggttatacgggttagagaagaaagttacgaaaaagttatataggaaaaaagtttagtattgtttattgggtgttggtgtttggaagtagttcggatgggttttagagtatttaagttatgatggtatttttttttgggatgttttttatttaggattttgagttgagaatgtatggaggtattaagagagaggttttcggttcgggttgttgtttttaaggtattttggtattttaacggtcgagtttttttgaatttggaatttttacggtttttgtgcgttttagaagtgttggtttttttttttatatttttatatttaggattggggatgatatattttttttttatgtcgatattttttattttttttgagtggaggttttagggtttatagattgttagttttatattagaatttttgcgtttttgttttaggataatcgcgttagtcgtttaattacgttttcgagatttatttttgtatagatagggttttattatgttgtttcgggttggttttgaatttttgggtttaagtaatttttttattttatttttt

SEQ ID NO: 83 - DNA, 1092 bp, Artificial Sequence
  chemically treated genomic DNA (Homo sapiens)
aagttttttttttattatttaagaaggtatttaggtttttttgtgttaggttttaggtaaagtgttggattatttagtaattgggtttagtagtaggatggttttagattgaggttttagggttaaaggattatttttttttttagcgttggttcgggaaaggtaagtttcgggcgggagcgtacgtcgcgttttcgaagtttggttttttcgttacgtttattttttgtttttatttcgcgtttttttaggttttttttcggtgaatcggatgttttgttagttttttattttgcgttttcggtcgcggttcgggtttttcgtaaagtcgttgttatttcggagggtttagttagcgggttttcggaggttggtcgggtaggcgtggtgcgcggtaggagttgggcgcgtacggttatcgcgcgtggaggagatattgttttgtcgcgatgggggttcggggcgtttttttacgtcgtaggtaagcggggcggcggttgcggtatttgtttatcgggagttttttttttttttttttgttgttgttgttttgtatttagttcgggggaggatagaagaaaaaggaggtagaatggatttttttggtttttttttgtggtcgggggcgggttagggtgggtcgcgttgtttaggtagttttgtcgtgttgttaggtagtttggtcgtcggcgtgggcgatgtcggcgttggggcgggagtcgcgagggtgggaggttttggggcgttttcgggacgtggagttagtagggttttgatttgaaaaacgacggtaaagcgtgtttttgattgtttttgagtattttatattttttagatttagggcgtttttatttttagttggaagtttagtttagagtaatggtgttattaaaaggggtgtgttggatgtgaaaatattttttggaagtatttataagtttgtaggaaatatgttttttttatttttttattttgttttttttattatttattttaagaagtaatagaatttgtgtagagtgtgttttaagttatattgtatgtttatttttgtttatgttgaattcggtgtatatttgtgagaataagttt

SEQ ID NO: 84 - DNA, 1092 bp, Artificial Sequence
  chemically treated genomic DNA (Homo sapiens)
aagtttatttttataagtatatatcgagtttaatataaataaaaataaatatatagtgtaatttaaaatatattttgtataggttttgttgttttttgaaatgggtaatgaagggagtagagtaagaaaataaggaaaatatattttttgtaggtttataaatatttttaaagggtatttttatatttaatatattttttttagtggtattattgttttaagttgggtttttagttgggaataaaggcgttttgggtttgaaaggtgtgaggtgtttagaagtagttaagaatacgttttgtcgtcgttttttaagttagaattttgttaattttacgtttcggaaacgttttagggttttttattttcgcggttttcgttttagcgtcggtatcgtttacgtcggcgattaggttgtttagtaatacggtagggttgtttgggtaacgcggtttattttggttcgttttcgattataggggaaggttaaggggatttattttatttttttttttttttgttttttttcgagttggatgtagagtagtagtagtaggagaaggaagggaaagttttcggtgggtaggtatcgtagtcgtcgtttcgtttgtttacggcgtgaaggagcgtttcgggtttttatcgcggtagggtagtgttttttttacgcgcggtagtcgtgcgcgtttagtttttatcgcgtattacgtttgttcggttagttttcgggagttcgttggttgggtttttcgggatggtagcggttttgcgagggattcgggtcgcggtcgaggacgtagagtaggagattgatagagtattcggtttatcgggagaagatttggaaaggcgcgggatgggggtaggaagtgggcgtggcgagggagttaggtttcgggggcgcggcgtgcgttttcgttcggagtttgtttttttcggattagcgttgaggagaggagtggttttttggttttgggattttaatttgaggttattttgttattgaatttaattattgggtagtttagtattttatttggggtttagtatagaaagatttgaatgtttttttggatgatgaaggggaagttt

SEQ ID NO: 85 - DNA, 3647 bp, Artificial Sequence
  chemically treated genomic DNA (Homo sapiens)
tatggtttagtttttagtttagttttgtgattttgggaaagtttttttagttcgtggaattttaaggtttaaggttttttttttgtaaaatggggaatgataatatttgttttttttggagttttggggatttagtgttttgaggaacgtggttgtaggttagagtggtatagagtagggtttaatgaagtatggcgtttatagtagtttttttgattggattaattttttcggatataatagtagggtaggggtggggtttggggagaaaggatatttttaattttgattttaatatttcgatggtttttaaggttgtttgtatatttatttaggtgtaagttttttaaggtgtggtgtgatgaattagtgatttttggagttaggttagcgtatttttttttcgtagggttgtaagttgtaggattgagaggtaggttgattaggttttgggttggatgatggggtgagagtaaggggttagttttgatatatgtttaatttttttttttagttttaagatattttgggtaaattgtttattttagtttttttgatttttattttaattttaatattagtttaagagaaaatagggatattgatggttatttagaagggttgttgtgttttatatatagtaatatttttcgaatgtttgtgatagcggtttaaggaataagttaattttatattattattttggatatttgtataaaattttattttatttttattatatgaatgtgttagggttgtttttttgttttgttttttttttttttttttgagatagagtttcgtttttgttgtttaggttggagtataatggcgcgattttggtttatcgtaattttcgttttttaggtttaagcgatttatttgttttagttttttcgagtagttgggattataggatgcgttattatgttcggttaattttgtgtttttagtagagatagggtttttttatgttggttaggttggtattaaattttcgattttaggtgatttatttgttttggttttttaaagtgttgtaattataggtatgagttatcgtatttagtcgtgttagggtttttttttgtttaatttttttttttttttttagtttttttttgtttgttttaatggagttttattttgttatttaggttggagtgtagtggtaagatttagtttattgtaatttttgttttttgagtttaagtaatttttttgttttagtttttcgagtagttgggattataggtgtttgttattatatttagttaatttttgtatttttagtagagatggggttttgttatgttggttaggttggtttcgaatttttgatttcgtgatttgtttgttttggttttttaaagtgttgggattataggtatgagtcgttatattcggttaatttttgtattatttttttaaagagagttttttaaattatataagttttaggttttataaaatttagatttgttttagtataattaaatttgggattatttattgagtaattattatgtgttaagtattgcgttgagtgtttttagagtattattttttttaattttagtatagtatgttagatgttgttttatagatgagttaattgagattagagatgtttagttatttgtttaaggtgatatgattgatatggaatagagttaagatttttttttttttttttgatacggagttttattttgttttttaggttggagtgtagaggcgtaattttagtttattgtaagttttgttttttaggtttacgtatttttttgttttagttttttgagtagttgggattataggtattcgttattatatttggttaattttttgtatttttagtagagatagggttttatcgtgttagttaggatggtttcgattttttgatttcgtgatttgtttgtttcggttttttaaagtgatggaattataggtgtgagttatcgcgattggttagatttaagatttgaatttaggtttttttggttttagaggtttttgttttttaattttttagtatgtatacgtatttgtttttttagaggtgtttgtttaagtgtgtttagtatatggaagtaagttagaaatgttaggtatatttgtaaagaggtgtgggagatgggggggagggaagagagaaagagatgttggtgttttttattttttagtttttgataggtgtttttgatttttttttgattagtatagttgtatttttggttggggtattttaattagaattgttaaatttagtatataaaaataaggaggtttagttaaatttgaattttagataaataatgaataatttgttagtataaatatgttttatgtaatattttgttgaaattaaaaaaaaaaaaaaaagttttttttttatttttatttttattattaggtttaaggaatagggttaggggttttaaatagaatgtggttgagaagtggaattaagtaggttaatagaaggtaaggggtaaagaagaaattttgaatgtattgggtgttgggtgtttttttaaataagtaagaagggtgtattttgaagaattgagatagaagtttttttgggttgggtgtagttgttcgtggttgtaattttagtattttgggaggttgaggcgggaggattatttgagtttgggagtttaagattagttttattaacgtggagaaattttgtttttattaaaaatataaaaaatttagttggttatggtggtatatgtttgtaattttagttgttcgggaggttgaggtaggagaattatttgaattagggaggtagaggttgtggtgagtagagatcgcgttattgttttttagtttgggtaataagagtaaaagttcgtttaaaaaaaaaaaaaagttttttcgatgtgattgtttttttttaaatttgtagatttttttaagattatgttttttagatattttaaagattttagaagatatgtttcgggggttttggaagttataaggtaaatataatatatttttttttttgattattaattttattagaggatgtggtgggaaaattattatttgatattaaaataataggtttgggatggagtaggatgtaagttttttaggaagttagataattgagatttaaagggtgttaagagtggtagtttagggaaatttatttcggatttcgggggagggggtagagttattagtttttgtatttagggatttttcgaggaaaagtgtgagaacggttgtaggtaatttaggcgtttcggcgttaggagggacgatttaggtttgcgcgaagagagggagaaagtgaagttgggagttgtcgatttttagatttcgttggaatgtagttggagggggcgagttgggagcgcgtttgtttttaattatcggagaaggaggaggtggaggaggagggttgtttgaggaagtataagaatgaagttgtgaagttgagatttttttttattgggatcggagaaattaggggagtttttcgggtagtcgcgcgtttttttttacggggttttttattgcgtcgcgcgttcggtttttatttttcgtagtatttcgcgtttcgcgtttttttagtcgggtttagtcggagttatggggtcggagtcgtagtgagtatt

SEQ ID NO: 86 - DNA, 3647 bp, Artificial Sequence
  chemically treated genomic DNA (Homo sapiens)
ggtgtttattgcggtttcggttttatggtttcggttggattcggttgggagggcgcggggcgcggggtgttgcgaggggtgggggtcgggcgcgcggcgtagtaaagggtttcgtgggaaggggcgcgcggttgttcggggggtttttttggttttttcggttttaatggaggggaattttagttttataattttatttttatatttttttaagtagttttttttttttatttttttttttttcggtgattgggagtaagcgcgtttttagttcgttttttttaattgtattttaacgaagtttgggagtcggtaatttttagttttatttttttttttttttcgcgtaggtttgggtcgttttttttagcgtcgggacgtttgggttgtttgtagtcgtttttatattttttttcggagaatttttaaatgtagaggttggtgattttgttttttttttcggagttcgggataaatttttttaggttgttatttttaatattttttaagttttagttatttaattttttggggagtttgtattttattttattttaagtttattgttttaatattaaataatggtttttttattatattttttagtaaaattgatagttaaggagggggatgtgttgtgtttattttgtggtttttaggattttcggggtatattttttggaatttttgaagtatttgaaaagtatgattttaagagggtttataaatttgggaggagatagttatatcgaaaggatttttttttttttttaaacgaatttttgtttttgttgtttaggttggagagtaatggcgcgatttttgtttattataatttttgtttttttggtttaagtgatttttttgttttagtttttcgagtagttgggattataggtatgtgttattatgattagttgaattttttgtatttttagtaaagatagggtttttttacgttggtgaggttggttttgaatttttaagtttaggtgattttttcgttttagttttttaaagtgttggaattataattacgagtaattgtatttagtttaaaaagatttttattttaattttttaaaatgtattttttttgtttatttaaggaggtatttagtatttaatgtatttaaggttttttttttgttttttgttttttattagtttgtttaattttattttttaattatattttatttggagtttttgattttattttttaggtttagtggtaggggtggggatggaaggaagatttttttttttttttttaattttaataagatattgtatgggatatatttatattaataaattatttattgtttatttgaaatttaaatttaattgggtttttttatttttatgtgttaaatttggtagttttagttggaatgttttagttaagaatgtagttatattggttaagaagggattaaaggtatttattagggattggagaatgaaggatattagtatttttttttttttttttttttttttattttttatatttttttataggtatatttagtatttttaatttgtttttatgtgttgagtatatttaagtaggtatttttagagggataggtgcgtatgtatgttagggagttgagaaataggggtttttgggattaagaggatttgggtttaaattttgaatttggttagtcgcggtggtttatatttgtaattttattattttgggaggtcgaggtaggtagattacgaggttaggagatcgagattattttggttaatacggtgaaattttgtttttgttaaaaatataaaaaattagttaggtgtggtggcgggtgtttgtagttttagttatttaggaggttgaggtaggagaatgcgtgaatttgggaggtagagtttgtagtgagttgagattgcgtttttgtattttagtttgggagatagagtgagatttcgtgttaaaaaaaaaaaaaaaaattttgattttattttatattagttatgttattttgggtaagtgattgagtatttttggttttagttggtttatttgtaaaatagtatttgatatattatgttggggttaaaggagataatgttttggaagtatttagcgtaatatttggtatataataattgtttaataaatggttttagatttagttatattggggtagatttaggttttgtggggtttgaagtttatataatttgggaaattttttttaagaaagtaatataaaagttggtcgagtatggcggtttatgtttgtaattttagtattttgggaggttaagataggtagattacgaggttaggagttcgagattagtttggttaatatgataaaattttatttttattaaaagtataaaaattaattaggtgtggtggtaggtatttgtaattttagttattcgggaggttgaggtaggagaattgtttgaatttagagggtagaggttgtagtgagttgagttttgttattgtattttagtttgggtgatagagtaagattttattgaaataaataaagagaggttaaagagagagaaaggaattgaatagaaaaagattttagtacggttgggtgcggtggtttatgtttgtaattgtagtattttgggaggttaaggtaggtggattatttgaggtcgggagtttggtattagtttgattaatatggagaaattttgtttttattaaaaatataaaattagtcgggtatggtggcgtattttgtaattttagttattcgggaaggttgaggtaggtgaatcgtttgaatttgggaagcggaggttgcggtgagttaagatcgcgttattgtattttagtttgggtaataagagcgaaattttgttttaaaaaaaaaaaaaaaaaataaaataaaaaaataattttagtatatttatatagtaaggataaggtggagttttgtataggtatttagagtgataatgtaaaattaatttattttttggatcgttgttataaatattcgagaaatattgttgtgtatggaatatagtagtttttttggatggttattaatatttttatttttttttgagttggtgttagggttagggtgaggattaggggaattgaggtaagtaatttgtttaggatgttttagggttagagagaaaagttgggtatgtattaaaattgattttttatttttattttattatttagtttaggatttggttaatttgttttttagttttgtagtttatagttttgcgggaagaggatgcgttgatttggttttaggagttattggtttattatattatattttggagggtttgtatttggatgagtgtgtaggtagttttagaggttatcgggatgttaggattagggttagaggtgttttttttttttaggttttatttttgttttgttgttgtgttcggaaaggttagtttagttaggaaagttattgtggacgttatgttttattggattttattttgtgttattttgatttatagttacgttttttagaatattgagtttttaagattttagaggaggtaggtgttattattttttattttgtagaagaggaattttgagttttgagattttacgagttaaaggaatttttttaaggttatagagttgagttgggaattgagttatg

SEQ ID NO: 87 - DNA, 2205 bp, Artificial Sequence
  chemically treated genomic DNA (Homo sapiens)
ggatttttagtaggggagtaatatggatttggaaagattattttggttgttgtgtggggatagataagacggtgggagtttagaaaggaggttgggttggaaattttgggatagaaatttagagaggaaaagattgggtttggggtttttagtgagtattagggagtggggaattagtaggagtttggtttttatttatttttttttttttttttttttttttttttgtaggttggtttcggttttatttttaggtgtggttttaggatagttttggtcgttgttagtttgtaggttatggattttgttatgtgtttagtagttcgggtatttattagttggtttgttttacgtggcggtttttgggtagttggcgagaatagttggtacgggttttcgtgggtggtgggtcgtagttgttgtatggggatattatttatagtggggtcgatcgttatcgtttgtatatagttgttggtggtatcgtgtatttggagatcggtttgttgtttcgtaatttcgatcgttacggcgtggagtgttgagggattttgtttttaacgttattattatttatatttcggatatttagtgatgggggaggatggtatagtggttaagagtatagattttagagattgttagagttgattttagttaaggtatggtatcgtttttgttttttttaggatttcggggtttttttgggtttagtttttttatttgtaaattggggatagtaaatgtatggggtcgtagggtgttgagtgataggaggttgtttagttatatgggaggtgtttagtaaaggagagtaatttttataggtgtttgttttttgatttttttattttttaggtgttttgttgttttttttttttattgatatttttcggaggtttttatgttgatagatttttttttttttattttgttttttagtttgatttttttttcgttttgggttttttttttttggtcggtttttttgtgttttatttttcggattaagtttttttcgtttggttttttttttttggtgatttatatcgttcgtaaagttatagcgtatttggattattcgttttggtggcgtttggtcgttaggaggtagtattttgtttgcggggcggagtcggggagttcgtttttttttttttagggttgaagggatttttttcggagttcgtttacgcgagatgaggacggtggtttagtttttttatgttttttttttgggggtcgttttcgttttcgtttcgtgcgttttttgggtggggtcgggggcggttttaaaattttttgtcgatttagtcggttttcgtcgtcgtcgtttttcgcgttttgggttattttttttttattttttttcgcggagtagttagatagcgagggtttcggtcgggggtaggggggacgtttcgttcggggtattttttcggttttgagtcgttcgcggggtcggtttcggttcggagcggaggaaggagtcgtcgaggagtagtttgaggttttagagtttgagacgagtcgtcgtcgttttcgttattgcggggaggagggggaggaggagcgggaggagggacgagttggtcgggagaagaggaaaaaaatttttgagattttttcgttgtcgttgggagtcggaggcgcggggattttttggcgcgacgttgtttcgcgaggaggtaggatttggggattttagatcgtttttttttgtcgtcggggacgtttgttttttttttgttttttatacggcgttttttaggcgtttttatttcggattagttttcgggagtcgtcgattcggtttttcgtaaagatttttttttagatttcgggcgtattttttgtacgtcgtttttattttcggtttgttttttgagttttcgcgtattttagatttttttttttttaggagacggattttttttcgatttgttatagattttttatttaagattatttattttttggtattagatcgcgtttatttaggttattttcgtgggatattgagatattttcggtttaagttttttttttattattgcgtttttttttttgaggagttttagttttttttcgaggtttttttattttttgtcgggagatttttagtttttgtaggggcggggtttttttattatattagttttgttcgcgttttcggtagtgtcggggggcgtcgttttttttatg

SEQ ID NO: 88 - DNA, 2205 bp, Artificial Sequence
  chemically treated genomic DNA (Homo sapiens)
tatgggggaggcggcgtttttcggtattgtcgagagcgcgaatagggttggtgtggtggggaggtttcgtttttgtaggggttgggggtttttcggtaaaaggtaggagggtttcgagggaaagttgaggttttttagggagaagggcgtagtggtggaggggaggtttggatcgggggtgttttagtattttacggaaataatttagatgggcgcgatttggtattagaaggtgggtggttttgaataggggatttgtggtaggtcggagagagattcgttttttggaggagaaagggtttaggatgcgcgggggtttaggagataggtcggggatgaaggcggcgtgtagggggtgcgttcgaggtttggggaaaagtttttgcgggaggtcgggtcggcgattttcgagggttggttcggaatgggggcgtttgagggacgtcgtgtagggggtagggagggagtaagcgttttcggcggtaaagggaggcggtttggggtttttaagttttgttttttcgcggggtagcgtcgcgttaagaggttttcgcgttttcggtttttagcggtaacggaaaagttttaaaagtttttttttttttttttcgattagttcgttttttttttcgttttttttttttttttttttcgtagtggcgggggcggcggcggttcgttttagattttggggttttaggttgtttttcggcgattttttttttcgtttcgggtcgaggtcggtttcgcgggcggtttagagtcgggggggtgtttcggacggggcgttttttttgttttcggtcggggttttcgttgtttggttgtttcgcggagggaggtgggagggagatggtttagggcgcgaagggcggcggcggcggggatcggttgggtcggtagggggttttgaagtcgttttcggttttatttaggaagcgtacggggcgggagcgggggcggtttttagggggagggtatgggggggttgggttatcgtttttatttcgcgtgggcgggtttcgaggggggtttttttagttttgggggaaagggggcgggtttttcggtttcgtttcgtaaatagggtgttgttttttggcggttaagcgttattaaagcgggtgatttagatgcgttgtggttttgcgggcggtgtgggttattagagaaagaggattaggcggagaaggtttaattcgggggatgagatataggggagtcgattagaggagggggatttagaacggaaggagagttaggttgggaaataaggtaggagaaggagggtttgttaatatgggggttttcggagggtgttagtgggaggagggggtaataggatatttgagggatggaagggttaggaggtagatatttgtaagaattgtttttttttattgagtattttttatgtggttaagtagttttttgttatttaatattttgcgattttatatatttattgtttttaatttatagatagggaaattgggtttagagggatttcgaggttttagaaaggatagaagcggtgttatgttttagttggggttagttttgatagtttttagagtttgtgtttttgattattgtgttatttttttttattattgggtgttcggggtgtggatggtggtgacgttggaggtagagttttttagtattttacgtcgtagcggtcgaagttgcggagtagtaggtcgatttttaggtgtacggtgttattagtagttgtgtgtaggcgatagcggtcggttttattgtagatggtgtttttatgtagtagttgcggtttattatttacgaaagttcgtgttaattgttttcgttaattgtttaggggtcgttacgtggggtaggttagttggtgggtgttcgggttattgggtatatggtaaaatttatagtttgtaagttggtagcggttaaagttgttttgggattatatttggaaatggagtcggggttagtttgtaggaaaggagagagaggggaaaggagggatgggtggggattagatttttgttgattttttattttttgatatttattggagattttaggtttagtttttttttttttgggtttttgttttagagtttttaatttagttttttttttaggtttttatcgttttatttatttttatatagtagttaaagtgatttttttaaatttatgttatttttttgttaaggattt

SEQ ID NO: 89 - DNA, 3037 bp, Artificial Sequence
  chemically treated genomic DNA (Homo sapiens)
gaattttcgaaattttttttgtagaaaattttggaaggtgtttgttatattgattttggaatgtgtgtttatttggggttatataaatttgttttgtggaagttatttgaagttaggaagagatggagggtattttttaggagtgagatgagattttattatatttgattgtttagtattatttttgagtgaggggattaaaaaatttattttttaaattaggatatttttaagagtggaagggggatttattaatatttttatttggataagaggtaaatattagaatgttttcgatgaaggggatatataatggatttttttgatgtgaaatttgttagatgggttggaaagttcgtatattgggataagtatgatttgagttgtttgggataaggataggggtataagagaaggaaatgggtaaagagagaagtttgtatttagttaagggtgtagagatgttatatatgattgttttttagggaatcgggtttttagtttatattttagttgtttaattattttttttttgaattgattgttttttttttggaattttaggtttgattttattttttggtttttttagtttacgatttttttgattcgatttttttttttagaatttagtcgtttgaatttttagtttgtggtttttttttaggttttagttttttttgtttttgattgaaatagtagtattttttaagttttgggggttttttcgggttttagtttcgatttagaattcgttcgttgtttgttacgttgttattgtcgttttttttataaagggatttgagcgttcgggtttaggggtttcgtatagtaggtgaggtttttttgttttatttttttgggttgttcgtgtttcgtgttttggattatcgtttagtagtgttttgttttttgtttgggtttcggttttttttgtatttgttgtttggattttcggtttgtttgggtttgggttttggtgggtttggttttggtttttttttttgtttttgattttttatttgttagttttattgtttttgttatatattttttgtttttgttatggtttttttttgttttttttttgtttttttttgtttttttttgtttattttggggtttttttgattgtattttgtttttttttttgtcgatttttttttcgggggtcggggggtgttgttttttagggcgggaggtttgtttttcgtcgcgtgtttcgtttcgtttattgtttttttttttttttttttttttttgtaggttttttttatgatattatttgaacgttttttttttttaagggtgtgtggtattattttatattttttttttttggggttgttgttggttttgttgtttggggtttaggtgaggtagtaggagaatgggggttgttggggtggtttagttaaattttgagttttagagttttttttaattttgtttttttttaggggttttttggtgttggttttatatttttagttgtttagattgttcgttagtattttaagatgtattttgtttatagtaattttaaatttgttgtttattttattggtaaatatttatttgattttttagatatgtttttattagttttttttttatttttgttttaggaatttaagtatttattttttttttttaattttttttacgttaaaaaaaatagagggagtttatttttatgtttttttttgttattttttaggaatttagttgtttagtgtttatttttttagggattgagatttttgatttagatttttgattttttatttttattttttatggttttttttaggagattttagtaagtagaatttattgttttggagagtaaatacggatcgtgtttttttttaggatggtttttttttgagtaataatttttttttggtttttattagtggtatttatttcgtttatttttaggtggttttttttgggaaagtttatttttttaaggttattttttttttattttatttggtttatgaggtttagtttttttttttttagtattttttttatgtgtttttttttagtttttagaagatggtgtatttagggttgtaggaattttggttgtattcgatgtattacggggttgcgttttagtttatttagggagattagttatttatttatatagatggtattttttatttagtttttagttttagtattgttttttttggagttttcgttttgtagaatttggaaaaatttagaaagaaaaaataattgattttaagattttttttttattttgtttttattttgattattttaggggtcgttattattttttttttggttattttaatagtttaagttttttttgattaagttatcggagtttttaaagaaggaattttaggtattttaggggattatatttttttgaattatttttgatgtttgtttggttgaggattttaagtttgtttaggaatttttagtttaaagttgttggttttgtttattagttaggtggggtttagatttatatatagaggaagagtaggtatatggaggagtttgggggatgattagaggtagggaggggattatttatgaaggtaaaaaaattaaattatttatttatggaggatggagagaggggaataatagaagaatatttaaggagaaatagagataggtttaagagatgaagagtgagagggtatgcgtataaggttgattaagagagaaagaagtaggtatgagggattatagggttttagaaggtagggaaaggttttgaaagttagttgtcgattagagttttatacggaggtatttgtattttcgatgaagtttaataaattttttttttttgaaatgttgtttgtttgtgtgtgtgtgtttgggagtgagaattttttagtttatttaaggaatggagggagggatagagggtttaaagggagtaagagttgtggggagaataaaaggataagggtttagagagttttagggatatgtgatggatttattaggtgaggtcgttagattgttgtag

SEQ ID NO: 90 - DNA, 3037 bp, Artificial Sequence
  chemically treated genomic DNA (Homo sapiens)
ttgtagtagtttggcggttttatttggtgagtttattatatatttttgaagttttttgagtttttatttttttgttttttttatagtttttgttttttttgagttttttgtttttttttttattttttagatagattgggaagtttttatttttagatatatatatataagtagatagtattttagagaaaagaggtttattgggttttatcgagggtgtagatgttttcgtgtggggttttggtcggtagttggtttttagagtttttttttgttttttggggttttgtgattttttatgtttattttttttttttttggttagttttgtgcgtatgtttttttattttttattttttgggtttgtttttgtttttttttggatgtttttttattatttttttttttttattttttataaataaataatttaatttttttgtttttataaatagttttttttttgtttttagttattttttaagtttttttatgtgtttgttttttttttgtgtgtggatttaggttttatttagttggtggataagattaatagttttgggttgggaatttttaggtaggtttgaaatttttagttagatagatattagggatggtttagggaggtgtggttttttgggatgtttagaattttttttttgaaagtttcggtgatttgattagggaagatttgagttgttggaatggttaaaggagaggtggtgacgatttttgaaatggttagaatggaggtagaatggggagaaggttttgaaattaattattttttttttttggatttttttaagttttatagagcgaaggttttaaagaagatagtattagggttgaggattaggtgggggatgttatttgtgtgggtggatagttggtttttttgggtgagttggaacgtagtttcgtggtatatcgagtgtagttagggtttttgtagttttggatatattattttttgggagttgaggagaggtatatggaaggggtattgggaggagaagagttggattttatgggttaggtagagtggggaggaggtggttttgggagagtaggtttttttagagaagattatttgggagtagacgaagtagatgttattggtggggattaggagagaattgttgtttaaggagaaattattttggaggaaggtacggttcgtgtttgttttttagagtagtgagttttgtttgttggggttttttaggaagagttataggggatgggggtgggagattaggggtttggattagaggttttaatttttgaggaagtgggtattgaataattgagtttttgggggatggtagggggaggtataggagtgggttttttttgttttttttagcgtgggggaagttgggggagaggggtggatgtttgggtttttgaggtaggggtaggaggagagttggtggggatatgtttgggaggttaggtggatgtttattaatgaggtgagtagtaggtttgaggttgttgtgggtaagatgtattttggggtgttgacgggtagtttgggtagttgaaggtgtgaggttaatattagggagtttttaggggagaatagagttgaggggggttttagggtttaaggtttggttgagttattttagtagtttttatttttttgttgttttatttgggttttaggtagtagaattagtagtagttttagaaggaggaggtgtagggtggtgttatatatttttgggaggaagagacgtttaggtggtgttatggggagaatttgtagagaaagagagagagagagagagatagtgagcggggcggggtacgcggcggaagatagatttttcgttttgggagatagtatttttcgattttcgagagagagatcgatagagaaggggataagatgtagttagagaaattttaaggtgagtagagggagatagagagagataggaagggaatagagaggaattatggtagaaatagagaatgtgtgatagagataatgagattgatagatggagagttagagatagagaaggaaattaaaattaaatttattaaggtttaggtttaggtaggtcggggatttaggtagtaggtgtaggagggatcgaggtttaggtagagggtaggatattgttgggcggtagtttaaagtacgaagtacgggtagtttaaggagatggggtaggagagttttatttgttgtgcggagtttttgggttcggacgtttaggtttttttatagaggaagcggtagtggtagcgtggtaggtagcgggcgggttttaggtcggggttggggttcggggaagtttttagggtttagaagatattgttgttttagttaaaggtaggaaaggttgaggtttaggagagaattataggttgggggtttaggcgattgagttttgggaaagggagtcgggttaggggaatcgtgggttgggagggttagggagtggggttaggtttagagttttaaagaagggatagttaatttagagaggaggtggttgagtagttggggtgtgagttggaggttcggttttttgaagagtaattatatataatatttttgtatttttggttgagtataggtttttttttttgtttattttttttttttgtatttttgtttttgttttaaataatttaaattatatttgttttagtatacggattttttagtttatttggtaggttttatattaagaaggtttattatatattttttttatcggggatattttggtgtttgttttttgtttaggtgaaaatattaatggattttttttttatttttgaaagtgttttagtttggaagataaattttttggtttttttatttagagatgatgttggatagttaagtatgatgaggttttattttatttttgaaggatgttttttatttttttttgattttaggtggtttttatagaatagatttatataattttaaataaatatatattttaggattaatgtggtagatattttttaaagttttttataaaggaagtttcgagaattt

SEQ ID NO: 91 - DNA, 1250 bp, Artificial Sequence
  chemically treated genomic DNA (Homo sapiens)
tttttttcggacgtataggtatttttcgcgtttttttagttttcgtcgttttcgttatcgttttcgggtcgtcgcgtttcggtatatataggatttttgttgggtattaatagttttattatggggttggtttggggattaggcgttttgtttttgatgtatgtgtgtggtattaatcgtattttagagtttggcggagataatagcgtgtttgatatttttgaatttatcggggtcgttcgtaaggggtttgggcgtcgattggtgaagggtttcgatttttttagtttagtttttcgtatcgaggatgttaatttgattttttttgtgtttgatgataagttttaagatttggtggatgttgtgcgggtagaaaagggttttttttttttggtatttttgaggtagatgaagaagattcggggtacgttgttggttttggagcggaaagattattttggttaggtttttagcgtggtgtttaatggtaaggcgggtattttggattttagtttgatcgtttaaggaaagtagtacgtggtgtttgtggaagaagtttttttggtaatcggttagtggaagagtattattttgtttgtgtaggaagatagggtttagttgtatatcgattgtgaaaagatggagaatgttgagttggacgtttttatttaaagcgtttttattagagatttggttagtatcgttagatttcgtatcgtaaaggggggcgttaatgataatttttagggggtgttgtagaatgtgaggtttgtttttggaattatattagaagatatttttaggaataaaggttgttttagttttattagtgttttttttatttttgataataacgtggtgaatggttttagttttgttattcgtattaattatattggttataagataaaggatttgtaagttatttgcggtattttttgtgatgagttgtttagtatggttttggaatttaggggtttgcgtattattgtgattacgttgtaggatagtattcgtaaagtgattgaagagaataaagagttggttaatgagttgaggcggttttttttatgttattataacggagtttagtatagaaataacgaggaatggattgttgatagttgtattgagtgttattgttagaatttagttattatttgtaaaaaggtgttttgttttattatgttttgttttaatgttatagtttttgatggagaatgttgttttcgttgttggtttagatgtga

SEQ ID NO: 92 - DNA, 1250 bp, Artificial Sequence
  chemically treated genomic DNA (Homo sapiens)
ttatatttaggttaatagcgaggatagtattttttattaggaattgtggtattggagtagggtatgatggggtaggatatttttttgtagatggtaattgagttttgatagtgatatttagtgtagttattaatagtttatttttcgttatttttgtattgaatttcgttgtgatagtataggggaggtcgttttagtttattggttaattttttgttttttttagttattttgcggatgttgttttgtagcgtggttataatggtgcgtaggtttttgagttttaggattatgttggatagtttattataggagatgtcgtagatggtttgtaagttttttgttttgtggttaatgtagttagtgcggatggtagggttggaattatttattacgttgttgttaagggtgaggaggatattggtagagttggagtagtttttgtttttgaggatgttttttggtgtggttttaaagataaattttatattttgtagtattttttggaaattgttattgacgtttttttttgcgatgcggagtttggcgatgttggttaggtttttggtgaagacgttttggatggggacgtttaatttagtattttttatttttttatagtcgatgtatagttgggttttgtttttttgtataaatagggtgatgtttttttattggtcggttgttaggagagttttttttatagatattacgtgttgttttttttggacggttaggttgaggtttagggtgttcgttttgttattggatattacgttgaagatttggttagagtggttttttcgttttagggttagtagcgtgtttcgggttttttttatttgttttagggatgttagaaggaggaaatttttttttgttcgtatagtatttattaggttttggaatttgttattaggtataggggggattaggttggtattttcgatgcggaaagttgggttggaagggtcggggttttttattagtcggcgtttagattttttgcgggcggtttcggtgagtttaaagatgttaaatacgttgttgttttcgttagattttggaatgcggttggtgttatatatatgtattaggaataggacgtttagtttttaggttagttttatggtggagttgttggtgtttagtagggattttgtgtgtatcggagcgcggcggttcgggagcggtggcgagggcggcgagggttggaggggcgcggggaatgtttgtgcgttcgggggggg

SEQ ID NO: 93 - DNA, 3107 bp, Artificial Sequence
  chemically treated genomic DNA (Homo sapiens)
ttgtagtgaacggtgattatattattgtatattagtttggggatatagttagattttgttataaaaaagtaaaaataattggttagtgtatgaggggttcgtgttttttgtttgtttgtttgttgagatagagttttattttgtcgttagattggaatgtagtggtatattttcggtttattgtaatttttgttttttaggtttaagtaattatttgttttagttttttaagtagttgggattataggcgttcgtattacgttcggttaatttttttgtatttttagtagagacggggttttattattttggttaggttggttttgaatttttgattttatgatttattcgtttcggttttttaaagtgttgggattataggcgtgagtttttcgttcggttaggggcgcgcgtttttaaaatatgggagagggaattgtgttttataattattattaggtgtttcgatatcgggtgttacgtcgtttcgtttttgaggcgcggcggtttattttggtaggtcgaggcgggtggattatttgaggttaggagttcgagattagtttgataaatatggtgaaatttcgtttttattaaaaatataaaaaattagtcggacgtggtggcgtatgtttgtaattttagttatttgggaggttgaggtaggagaatcgtttgaattcgggaggcggaggttgcgatgagtcgagatcgcgttattgtattttagtttgggaaataagagcgaaattcgttttaagaaaaaaaaggaaagattttttttttttttttcgtcggaaatatttttttttaggacggcgcgtttgtgcggcgacgcgcgtttagttatttagtaatttcggcgttaagttattttaggtggagtttagtaataatagagttatcgcgttttttattaattagcgtcgatttcgttttcgtaggtttaattaattagtgtcggcgttgtaaggaagtttttagagttttcgaggaaggtttttttaatttaaatttattcgtttgataatttttttatatttttttaaagaaggaagagaagcgtatagaggagaagggaaataattttttaggagttttttttacggttatgaggaatttggggtttagttgaaaagtttaaattgtttttcgggaggttgggcgcggcgaattatttttagcggcgtacggagacggcgtttacgtgaggggtgataagtgacgtaatattcgttgtataaatttgttttcgttagttcggagtatttaggggcggttggttttgttgggtgagtttgtttgtgtttttgtgggtggacgtggttggtgattggtaggattttggtattcgttaataggtattggttcgtagtcgtaacgattttgggggggtgtgagaggggggaatgggtgaggttaaggtggaggttttttggggttgggtgggtcgttgaggggagggcgtgggggaggggagggcgaggtgacgcggcgttgggttttttcgggatagtgggttttgttgatttgaggggggcgagggcggttggcgcgcgcgggttgacggaaattaacggacgtttaatcgatcggcgattttgtcgagtttatttcgcggggaaggcggaaaagaggtagtttgtgtggtttttggaagtttttattttggaattttagtgtgagaaaggtgtttttttttgtgttttaatgggatttttatttcgcgagttttgtgggtttggttttgtttttagtttgtttaatatcgtgtttaggtttgaggtagattggagttcggtcgggggagtttgaatattcggaatagttagtggggaaagttgtggacgtttggtaagagagcgttttggatttttcgttgttgacgttgaaattttgaatgacgaatttcgtattaagtgatttagttttgtaaaattgaggggaggtttgcggaatattaacgtatttaaggtattttgaaggaatagttgttaattttgaagaatattaggtgtaaaagtaagaaatataatgattttgaggtgatacgtttatgttttatttttaaattaggttaaaatgtagattttcgtgaaaatttttatcggtaagattattatttttgaggtggagtttagtgatattatcgaaaatgtgaaggttaagatttaggataaggaaggtatttttttcgattagtagaggtttatttttgtaggtaagtagttggaagatggtcgtattttttttgattataatatttagaaggagtcgattttgtatttggttttgcgtttgagaggtggtatgtagattttcgtgaagattttgatcggtaagattattattttggaagtggagtttagtgatattatcgaaaatgtgaaggttaagatttaggataaagaaggtatttttttcgattagtagaggtttatttttgtaggtaagtagttggaagatggtcgtattttttttgattataatatttagaaggagtcgattttgtatttggttttgcgtttgagaggtggtatgtagattttcgtgaagattttgatcggtaagattattattttggaagtggagtttagtgatattatcgaaaatgtgaaggttaagatttaagataaagaaggtatttttttcgattagtagaggtttatttttgtaggtaagtagttggaagatggtcgtattttttttgattataatatttagaaggagtcgattttgtatttggttttgcgtttgaggggtggttgttaattttttagttatggtattcgtagtgtttagtgatggtattattttgtattatagttatttgttttaatttaagtttagaaattataagttttagtaatagttgaatttgtttaaaatgttaataaaggtttcgttgtatggtagtatatttggtgttttgttatgaaattttttagtgatgtgtgggtacgtttaaaattggtgaaaatgtttagggatttaattttgagattggtaatgtgtttaaagttaagttatttgattttggtatatatttgggtgggttgaggggtaagagttttttttgttgtttaagttattataagttaggattt

SEQ ID NO: 94 - DNA, 3107 bp, Artificial Sequence
  chemically treated genomic DNA (Homo sapiens)
ggattttaatttgtaatgatttaaatagtaaagaaggtttttgttttttagtttatttaagtgtatattaaagttaagtgatttaattttgagtatattattaattttaaaattaaatttttaaatatttttattagttttaagcgtatttatatattattagagaattttatgataaaatattaagtatgttattatgtaacgaaatttttattaatattttgaataggtttagttattattgaaatttgtaatttttaaatttaagttggggtaaatggttatagtgtagagtaatgttattattgggtattgcgaatgttatgattgaagaattaatagttattttttaggcgtaggattaggtgtagggtcgattttttttggatgttgtagttagaaagagtgcggttattttttagttgtttgtttgtaaagatgagtttttgttggtcgggagggatgttttttttattttggattttggtttttatattttcgatggtgttattgggttttatttttagagtgatggttttgtcggttagggtttttacgaagatttgtatattattttttagacgtaggattaggtgtagggtcgattttttttggatgttgtagttagaaagagtgcggttattttttagttgtttgtttgtaaagatgagtttttgttggtcgggagggatgttttttttattttggattttggtttttatattttcgatggtgttattgggttttatttttagggtgatggttttgtcggttagggtttttacgaagatttgtatattattttttagacgtaggattaggtgtagggtcgattttttttggatgttgtagttagaaagagtacggttattttttagttgtttgtttgtaaagatgagtttttgttggtcggggggaatgttttttttattttggattttggtttttatattttcgatggtgttattgggttttattttaagggtgatggttttgtcggtaagggtttttacgaagatttgtattttgatttagtttaaaagtaaaatataagcgtgttattttaggattattgtattttttgtttttatatttaatattttttaaaattagtaattatttttttaaaatgttttaaatacgttaatatttcgtaagtttttttttaattttataaggttaagttatttaatacgaaattcgttatttaaggttttaacgttaatagcggaaaatttagagcgtttttttattaagcgtttatagttttttttattaattgtttcggatatttaaattttttcgatcgaattttaatttgttttaaatttaagtacggtgttaggtaaattgaaaataaaattaaatttataagattcgcgaaataaaaattttattgaaatataagaaggggtattttttttatattgggattttaaagtaaaggtttttagaaattatataaattatttttttttcgtttttttcgcgaagtaaattcgatagaatcgtcgatcggttaggcgttcgttagttttcgttaattcgcgcgcgttaatcgttttcgttttttttaggttaataaggtttattgtttcggaaaggtttagcgtcgcgttatttcgttttttttttttttacgttttttttttagcggtttatttaattttaagaagtttttattttgattttatttattttttttttttatatttttttaaggtcgttacggttgcgggttagtatttgttagcggatattaggattttgttaattattaattacgtttatttatagggatataaataagtttatttaataaagttaatcgtttttaaatgtttcgggttggcggaggtaaatttatgtaacgagtgttgcgttatttattattttttacgtagacgtcgttttcgtgcgtcgttgaaagtagttcgtcgcgtttaatttttcgagaggtagtttaggttttttaattgagttttaaattttttatagtcgtaagaaaggtttttaaaaaattatttttttttttttttatgcgttttttttttttttttaggaaaatataagaaaattattaggcggatgaatttgagttgaagaaatttttttcgaaagttttggaaatttttttgtagcgtcggtattgattggttaggtttgcgaaggcgaggtcggcgttgattggtgggggacgcggtggttttgttgttgttgggttttatttggggtggtttagcgtcgaggttgttaagtaattgagcgcgcgtcgtcgtataggcgcgtcgttttgaaagagggtattttcggcgggagaaggagggggggttttttttttttttttttgagacggatttcgtttttgttttttaggttggagtgtaatggcgcgatttcggtttatcgtaattttcgtttttcgggtttaagcgatttttttgttttagttttttaagtagttgggattataggtatgcgttattacgttcggttaattttttgtatttttagtagagacggggttttattatgtttgttaggttggtttcgaatttttgattttaggtaatttattcgtttcggtttgttaaagtgggtcgtcgcgttttagaagcgggacggcgtggtattcgatatcgagatatttgatggtgattgtgaagtataatttttttttttatgttttaaaaacgcgcgtttttggtcgggcgggaggtttacgtttgtaattttagtattttgggaggtcgaggcgggtggattatgaggttaggggtttaagattagtttggttaaggtggtgaaatttcgtttttattaaaaatataaaaaaattagtcgggcgtggtgcgggcgtttgtaattttagttatttgggaggttgaggtagataattgtttgaatttaggaggtagagattgtagtgggtcgagaatgtgttattgtattttagtttggcgatagagtgagattttgttttaataaatagataaataaaaaatacgagttttttatatattggttagttgtttttgtttttttgtgataaagtttggttgtgtttttaggttggtgtgtagtggtgtgattatcgtttattgtag

SEQ ID NO: 95 - DNA, 4001 bp, Artificial Sequence
  chemically treated genomic DNA (Homo sapiens)
tatggaaagtgtaaatagtgttcggtgtaaagtaggagttgtgataagtggatttttttttagaaatgggatttcgggttaggagtagtggtttacgtttgtaattttattattttgggaggttaaggtgggtggatcgtttgaggttaggagttcgagattagtttggttaatatggtgaaattttgtttttattaaaaatataaaaattaggtacgtgtgatggtgtatgtttgtaattttagttattcgggaggttgaggtaggagaatcgtttgaattcgggaggtgaaggttgtagtgagttgaaattttgttattgtatcgtagtttgggcgataagagtaaaattttatttgaaaaaaaaaaaaaggaaagaaagaaggaaagagaaggaaagaaagaaggaaagagaaaggaaggaaagaaagaaagaggaaaaaaggaaaggaaaaggaaaaagaaaagaaagaaaaggaaggaaagggagaaatgggatgtttgttaggtgtagcgttttggggaggcgtggagagtttataatagggattaaggtgttttttagtcgtagaatatggattatttgttaggtgtggttttggtatatttaggttattggttttgtcgatttgttaaatttaattatttgggtattttttcggttaatatagaggatgtttttatgtgaatacgtgtttatttgtgaaatgtttataatgttaaaggttcgttttggggtaaatatttgatagcgtttggtaaatttaataaatgttttttttgtaatgagtaagttttttaatgtttaaagaaatagttgaattcgttagtaatatgtcggatgttttttttatgtttgtatattttttcgttagtttttttttttttttttttttgagacggagtttcgtttttgttgtttaggttagagtgtaatggtgttatttcgttttatcgtaatttttatttttcgggtttaagcgagttttttgttttaacgttttgagtagttgggattataggtatgtgttattacgtttggttaattttgtatttttagtagagacggggtttttttatgttggttaggttggtttcgaattttcgattttaggtgattcgttcgtttcggttttttaaagtgttgggattatcggcgtgagttatcgcgttcggttcgttagttttaatatttatgttttttggagggtgaagggtttgaaaggtattaaaaattttggtttttaggagcgagttaaatttttttttttagagattgaaggaggttattcgatttcgtttttaggaaaatttaattcgtaatttttttttcgttttggtttttttaggttttattattcgcgtcggggagacgcggttcggtttacgttaggtcggtaagaatttattaggttttaggagggcggggtcgagttttagaagtcggggttcgggttaggagttttggtgtaggcggattcgggcgcgtgttatgggattataattttcggtacgtatcgcggattgcgtcgaatacggttggttgggagatttaattttattgtttttatcggttaatgggacggaggaaagaggtttgattcggattttcggaggttaatggtaatatagaggaggcgggtgtttttttattatttattttgcgtttagagaagttatatttaaaaggtcgtgtcgggtcgggttttcgtaggtagtgggattagagtcgggaggggcggcggtgtttcgggaaagcggtttttggggtattcgggttttttcgaggcgggtttcggacgtcgtcgtgggcggggtcgagggcggggtttggtttcgttgtggagcggttcgtaatttattatggcggtcgcggggtttggtgtttgtgtttgagtagcgttggagtcggagtcggttttcgggttttgcggttgaggagttttttcgttgtttacggtttttatcggcggggggcggttgggtttttcggcggagttcgggagatgtgattgtttgagggcggtggtggtgttagcgttcggggtcgggggagggggtgtttcgggtagagattttcgggtttggggtagttgaggcggtcgggttttttttatacggggttcgtttttcgttgtttgggtcgcgagagtttttcgttttttatagtttcgtttcggttttgggatattgcgggtggtttgttttttttagtttgggatatttcgttttttgaggcgtggaagagcgtcgtttcggagtaagttgttcgtgtcgcgtttcgatagttttttttagttttaagtcgttttttatttcggatttcggttttaattttggttacggagttttttatttaaattttttttttgttgttaaggggttttttttttttttaaggtggttttcgcgagtttttaatgttttgattttttttaatgttatttacggtttttttagttttagtttagttaaaaattttaatgtaaaggaaaagtttggattggttttataggttttttaaaaagcggatttaaaagttgttggtaatgtattttttttcgttagagtcgagggtaaattcgttgaaatttgggtgattcgtgttttttttcggagagtaaagtagagaagcgagagcggttattagttcggtaggaaatttgttggaagatgaagaagttaagatagggggttggtgatttttataggaaaagttttggaggagtagttaaagattattagcgttttttttatgtgtgagaattgaaatgattagtattattgattttttttagtattttttgtgaatatttttgtttaggtttttttttttgaaaagaaattgttatttagttcgtttaaaataaattaagaaatttttgggtaatattgtaattatatgaaattgataatcgcgaaaataattggaatttttgtttgtaagtgttaatttaaaaaaagtgtttttttttgttatggaagatgtttttttgtgattgattttaattgttgatttgtggagatgtagcgaatgtgaaattttacgtatatgttatttttttttacgttcgttgatcgttttggaagattttgaatttttttttggaaaggggtatttattattattttatggggtagtagtttggaaaagtatttggggattaaagaaggttaagtttgtttgttttgtattttattaaaggagtagggaagaaggaattatcgaggtatgggggtttatattgtaatgtttttgtggaatatggtgagtgttttttaaaatttttgtttatggttttttttatgtatttattttaggtttttaaggaattttgaataatagtatttgcgatagttttttttaattttatttaataaatttgttattgtagttattttttagtggaattttttttgtataagaaaaagttatttcgtgatttcggttttatttaaaatttatttgagttgtttattttttgtttgatttttttgttaatttattgttgattttggataagttattttattgttttagggttttagttttttgaggggttggattttagtggttttttagggtttttggttttatgattttgttttaatcgaagtcgtgggtttttttgataagtatggattttttattgttttgtttatagagagtttttattatatttttaaagtggtttgtgtttttgagaaagttaagaattatagatattggttgacgttaatatttttgattttttttttcgtaagtaggatttgaaaatatttattttggagttatgtgggaaaaattaagtggggaagtagtattttttgtgaattttagatagatagtttttgttttattttttataaggagtaatttttttttcgttgatgaagtttttattttgttttttttttgtttagaatgatatttgggttaataaaggttatttgtgatatttttatgaatatatttggtatttgaatgttgttcgtatatt

SEQ ID NO: 96 - DNA, 4001 bp, Artificial Sequence
  chemically treated genomic DNA (Homo sapiens)
aatgtacgggtagtatttaaatgttaaatatgtttataaaaatgttatagataatttttattggtttaaatattattttaaatagggagaagataggatgaaagttttattaacgaggaagagattattttttatggaaggtaagatagaagttgtttatttaaaatttataaggaatgttgtttttttatttgattttttttatatggttttaaagtgagtatttttaagttttatttacgaaggaaaaggttaaggatattagcgttaattagtatttatgatttttaatttttttaggaatataaattattttgagaatatgataaaagttttttgtagataaagtagtaaagaatttatgtttgttagaagagtttacgatttcggttagagtagaattatagaattagggattttaagaaattattgaagtttagttttttaggaaattaaagttttggaatagtaaagtggtttgtttaaggttaatagtgaattagtagaggaattaggtaagaaataagtaatttaaatagattttgaataaagtcgaagttacgaagtaatttttttttatataaagaaagttttattaagagataattatagtaataaatttattaagtggaattggaaggaattgtcgtaagtattgttgtttaaagttttttgaaggtttaagatgaatgtatgaggaaaattatgagtagaaattttgaaaagtatttattatgttttataaaaatattgtagtgtggatttttatgtttcgatgatttttttttttttgtttttttgataaaatgtagggtaggtaagtttggttttttttggtttttaagtatttttttaggttgttgttttataaagtaataataggtatttttttttagaagagggtttaagattttttagaacggttagcgagcgtagagggaaatggtatatacgtgggattttatattcgttgtatttttataagttagtaattgaagttaattatagaaagatattttttataataaaaggaagtattttttttaggttgatatttgtaagtaggagttttaattattttcgcggttattaattttatgtaattgtaatgttatttaaaagttttttgatttgttttaaacgggttgaataataatttttttttaagaagaaaaatttaaatagaaatatttataggggatgttgaaaagggttaataatgttagttattttaatttttatatataaaggaaacgttgatggtttttggttatttttttagaattttttttgtggaagttattaattttttattttagtttttttattttttaataaattttttgtcgaattagtggtcgttttcgtttttttgttttgtttttcggaaaaggatacgggttatttagattttagcgagtttgttttcgattttgacgaaaaggaatgtattgttagtaatttttaagttcgttttttaaaaggtttgtggaattaatttagattttttttttgtattaaagtttttggttgagttgagattaagggggtcgtaggtgatattggaagaagttagggtattagaggttcgcgggagttattttgggggaaggggagattttttgatagtaagggagggatttgaatgggaggtttcgtggttaaagttggggtcgggattcggaataaggggcggtttggggttgagggaagttgtcggggcgcggtacgggtagtttatttcggggcgacgtttttttacgttttagaaaacggggtgttttaagttgggggaaatagattattcgtagtgttttaaagtcggggcggggttgtaagggacgaaggattttcgcggtttagatagcggaaggcgggtttcgtgtagaggaggttcggtcgttttagttgttttaagttcgggggtttttgttcgagatattttttttttcggtttcggacgttgatattattatcgtttttaggtagttatatttttcgagtttcgtcgagggatttagtcgtttttcgtcggtaggggtcgtggatagcggaggggttttttagtcgtaggattcgggaatcggtttcggttttagcgttgtttaggtatagatattaaatttcgcggtcgttatgatggattacgagtcgttttataacgaggttaggtttcgttttcggtttcgtttacggcgacgttcggagttcgtttcgaggggattcggatgttttaagagtcgttttttcgggatatcgtcgtttttttcggttttggttttattgtttgcgaaagttcggttcggtacgattttttaaatgtggtttttttgagcgtaaggtgagtggtaaggaagtattcgttttttttgtattgttattggttttcgagaattcgggttaggtttttttttttcgttttattggtcggtgggagtagtagggttggattttttagttaatcgtgttcggcgtagttcgcggtgcgtgtcgggagttgtggttttatggtacgcgttcgagttcgtttgtattaagatttttggttcgggtttcgatttttggggttcggtttcgtttttttgggatttggtagatttttgtcggtttagcgtaggtcggatcgcgttttttcggcgcgagtagtgagatttggaagagttaaagcgagggaaaaattgcggattggatttttttggaagcggagtcggataattttttttagtttttaagggagaaaatttggttcgtttttagaaattaaggtttttgatgttttttaagttttttattttttaaaaagtataaatattagaattagcgggtcgggcgcggtggtttacgtcggtaattttagtattttgggaggtcgagacgggcggattatttgaggtcgggagttcgagattagtttgattaatatggagaaatttcgtttttattaaaaatataaaattagttaagcgtggtggtatatgtttgtaattttagttatttaggacgttgaggtaggagattcgtttgaattcgggaggtagaggttgcggtgaggcgagatggtattattgtattttagtttgggtaataagagcgaaatttcgttttaaaaagaaaaaaaaaaaaaaattagcgaagaaatatatagatatagggaaaatattcgatatgttgttaacgaatttaattgtttttttgggtattaggaggtttatttattatagaaaaggtatttgttgggtttgttaggcgttattagatgtttgttttagaacgaatttttaatattataaatattttataggtggatacgtgtttatatgaaaatattttttatattagtcgagaaaatgtttagatggttgggtttagtaagtcggtagaattaatgatttagatgtgttaaagttatatttaataaataatttatgttttgcgattaaaaagtattttggtttttattataggttttttacgtttttttagagcgttgtatttgataggtattttatttttttttttttttttttttttttttttttttttttttttttttttttttttttttttttttttttttttttttttttttttttttttttttttttttttttttttttttttttttttttttttttttttttttagatggagttttgtttttgtcgtttaggttgcgatgtagtaataggattttagtttattgtaatttttatttttcggatttaagcgatttttttgttttagtttttcgagtagttgggattataggtatatattattatacgtgtttaatttttgtatttttagtagagatagggttttattatgttggttaggttggtttcgaatttttgattttaagcgatttatttattttggttttttaaagtggtgggattataggcgtgagttattgtttttggttcgagattttatttttaaggagggatttatttattatagtttttattttatatcgagtattgtttatattttttata

SEQ ID NO: 97 - DNA, 4501 bp, Artificial Sequence
  chemically treated genomic DNA (Homo sapiens)
ttagggagtaaataaattatgtgtggggttgggtaattagttgagtcgaagcgtaaataaaatgtgaatatacgtttgcgggttatatatagtgtatttttattagtatttagaaaaaattgtgagttagtgaattaggaaattaatgtttggaaggtagttaaattttaattagtttaagatttttttttttttttaaaaaaaggtacggaagtaatatttttttttttttttttgattagaatcgatgtattttttgtgtatgatcgtatttttaataataaaaggggaaagaggatttggaaaggaattaaacgttcggtttgttcggggaggaaagagttaacggttttttttataagggtttttgttgattttttcggttcggtttataagttttttatttgttttttttaggaagttcggtttcgcggttcgggtattttttgttttttttatattttttcgtttagtatttttgattttttttaaattcggtagttcgagattgttgtaaatcggcgttatagggcgtaaaggggatttgttttttttgaaatttggttgagaaattgggaatttcgtgtgggaggcgtgggggtgggacggtggggtatagattggtagagagtaggtaatttttttttcgttttagtttagttttggaataggtagatatattttagggttaaatagacgtttttcgtacggggttttacggaagtttgagtaggcggggtaggaggggcggtatttgttgttttggtagtaaattgggggatttagtttgggtggaaggtatttaatttagatagttgtgtatatataatgtataatatatgattttttttaataaatgtaatgggagtttatttataacgcgttttttaagtatacgtggtaatgcgttgttgggttattttaattattttaggtatcgtttttttttttatgtttttattatttttttttatttatattaatattttacgttttgaacgcgcgtttattaatattttttttttttttattttttttgggatttttgattaaagcgcggttttttttttagttttagcgaggcgttttgtagtttggtacgcgcgtggcgtggcggtgggcgcgtagtgcgttttttgtgtggagggtagttgtttcgtttgcgatgatttatatttataggataaggatgcggtttgttaaatagtattgttacggaggagtagtagagaaagggagagggtttgagagggagtaaaagaaaatggtaggcgcgcgtagttaatttatgcggtttttttattttgtttatattttagagttagagtgttcggttgttcggttgagttttttttttattttttttattttttttattttttttataagcgtttttttcgggtttttaaagtagagggcgtgggggaaaagaaaaaagattttttttcgttaattttcgtttatcggttttttataatgcgagggtttggacggttgaggattttcgagttgtgttgttcgcggtcgttatcgtcgggtttcggtcgtttttggttttttttttgtttcgagaagggtagggttttttagaggtttggcgggaaaaagaacggagggagggatcgcgttgagtataaaagtcggttttcggggttttatttaattcgttgtagtaattttagcgagaggtagagggagcgagcgggcggtcggttagggtggaagagtcgggcgagtagagttgcgttgcgggcgttttgggaagggagattcggagcgaatagggggtttcgtttttggtttagttttttcgttgattttttagttagcggttcgtaatttttgtcgtatttacgaaattttgtttatagtagcgggcgggtattttgtattggaatttataatattcgagtaaggacgcgattttttcgacgcggggaggttattttgtttatttggggatattttttcgtcgttgttaggattcgtttttttgaaaggttttttttgtagttgtttagacgttggatttttttcgggtagtggaaaattaggtaagtatcgaagtttatttgttttttaatttatttttttattattttaatgttgagatgagtcgaatgtttaaatagggtgtttttttttttatttttgcgttattgatattttttttagagtagttatggtaattggggttggggtggggggtaatttagaattggatcggggtaaagtgatttgttaagatgggagaggagaaggtagagggaaaacgggaatggtttttaagattattttttcgagatttttgttttatgaatatatttacgttgattttcggtcggtcggatatttttgttttattgtgttaattgttttttgggttttggggggttgggggttgttttgcggtgggtagaaagttttttgtattttgagttttttggagtagggatcgtatatcgtttgtgtgagttagatcgtttcgtagtcgttgatttgttttcgttttcgggagggtatttaaatttcggtttatcgtatttttgatagtcggagacggatattgcggcgcgtttcgttcgtttgttttcgcggcgattttaattcgttttgatttttttaagaagttggtatttggttttttaaaaagtaataatataatttaaaatttgggtttttagaggtgttaggacgtggtgttgggtaggcgtaggtaggggaaaagggaggcgaggatgtgttcgatttttttggaatcgttgatttggaaaaattagggcgaattttcgtatttagttttgatttttttgtcgcggtcgttttcgggtgttttcgcgttcgagatgcggaggaattgcgaggagcggggttttgggcggttttagaatagttgttatttttggtggggtggtttcgggggaggtatcgtagcggggtttttggcgtagttgtattttcgtattgagtgcgaagggaggtgtttttattattatttgatattttttttgtatttatggaggggtgttaaagttcgcggttgagttcgttattttagtcggcgagagaaagaagaaaagttggtaaaaggagtgttggacgggggcggtattgggggtggggacgggggcggtggagagggaaggttgggaggggttgcggtgtcggcgggggtaggagagcggttagggcgcgagtgggaatagtcgtagcggaggggtttcggcgcggagcggggtttacgtagtcgttagcgtttaggcgtttttcgtttttttttttaggtggcgtaaaattttgtgttttggattttggtaaattgttttttttatcgttatttttcgcggttttttaagggcgttagggtcgatttcgatttttttgtcgttgcggggtcgattttcgggttttgcgtttcgggttttcgggggagcgggggttcggcgggtattaagtcgttggtttattaagtgcgttttcgagatagtaggggattgtttaaagggggtgaaagggtgttttttttatttttttattaagattatttagtcgttttaggggatagttttgtaaggggagaggttcgggattgtggcgcgtattgcgcgttgcgttaggttttcgtattaagatttttttaatttaagattgtttttcgttttgtgtgtttcgttttagtagtttttcgcgacgatgttttttaacgttagttttattaataggaattatgatttcgattacgattcggtgtagtcgtatttttattgcgacgaggaggagaatttttattagtagtagtagtagagcgagttgtagttttcggcgtttagcgaggatatttggaagaaattcgagttgttgtttatttcgtttttgttttttagtcgtcgtttcgggttttgttcgtttttttacgttgcggttatattttttttttttcggggagataacgacggcggtggcgggagtttttttacggtcgattagttggagatggtgatcgagttgttgggaggagatatggtgaattagagttttatttgcgattcggacgacgagatttttattaaaaatattattatttaggattgtatgtggagcggtttttcggtcgtcgttaagttcgttttagagaagttggttttttattaggttgcgcgtaaagatagcggtagttcgaatttcgttcgcggttatagcgtttgttttatttttagtttgtatttgtaggatttgagcgtcgtcgttttagagtgtatcgatttttcggtggtttttttttatttttttaacgatagtagttcgtttaagttttgcgtttcgtaagattttagcgtttttttttcgttttcggattttttgtttttttcgacggagtttttttcgtagggtagtttcgagtttttggtgttttatgaggagatatcgtttattattagtagcgattttggtaagcgaagttcgtttaggtttgttaaaagtgggcggttggatatttttt

SEQ ID NO: 98 - DNA, 4501 bp, Artificial Sequence
  chemically treated genomic DNA (Homo sapiens)
gaaaggtatttagtcgtttatttttgataggtttgggcgggtttcgtttattagagtcgttgttggtggtgggcggtgtttttttatggagtattaggggttcggggttgttttgcggggaggatttcgtcgaggagagtagagaattcgaggacggagagaaggcgttggagttttgcgaggcgtaggatttgggcgagttgttgtcgttgagagggtaggggaagattatcgaggggtcgatgtattttgaggcggcggcgtttagattttgtaggtataagttggaggtggagtagacgttgtggtcgcgggcggggttcgggttgtcgttgtttttgcgcgtagtttggtaggaggttagtttttttgagacgagtttggcggcggtcgagaagtcgttttatatatagttttggatgatgatgtttttgatgaaggtttcgtcgttcgggtcgtagatgaaattttggtttattatgtttttttttagtagttcggttattatttttagttggtcggtcgtggagaagttttcgttatcgtcgtcgttgttttttcgaagggagaagggtgtgatcgtaacgtaggagggcgagtagagttcggagcggcggttaggggataggggcggggtgggtagtagttcgaattttttttagatattttcgttgggcgtcgggggttgtagttcgttttgttgttgttgttggtagaagttttttttttcgtcgtagtagaaatacggttgtatcgagtcgtagtcgaggttatagtttttgttggtgaagttaacgttgaggggtatcgtcgcgggaggttgttggagcggggtatataaagcgggaggtagttttgagttaaaggggttttggtgcggaaatttggcgtagcgcgtagtgcgcgttatagtttcgaatttttttttttgtagagttattttttaaagcggttgggtggttttggtgggggaataaagggagtatttttttattttttttggatagttttttgttatttcggagacgtatttagtgaattagcggtttggtgttcgtcgagttttcgttttttcgggagttcggagcgtaaagttcgggagtcggtttcgtagcggtagaggaatcgaaatcggttttggcgtttttaagaagtcgcgggaggtggcggtgaggaaaataatttgttaaaatttaaggtataaagttttgcgttatttgaaggagaaggcgagaggcgtttgggcgttagcggttgcgtgaatttcgtttcgcgtcggggttttttcgttgcggttgtttttattcgcgttttagtcgtttttttattttcgtcggtatcgtagttttttttaattttttttttttatcgttttcgtttttatttttagtatcgttttcgtttaatattttttttgttagttttttttttttttttcgtcggttggagtggcgagtttagtcgcgggttttaatatttttttataaatataaggggggtgttaaataataataggggtattttttttcgtatttaatacggagatgtaattgcgttagagatttcgttgcgatatttttttcggagttattttattaagggtagtagttgttttggaatcgtttagagtttcgtttttcgtagttttttcgtatttcgggcgcgaggatattcgagggcggtcgcggtaggggagttagggttgggtgcggagattcgttttggtttttttaagttaacgattttaggagaatcggatatattttcgtttttttttttttttgtttgcgtttatttaatattacgttttaatatttttagagatttaggttttaaattgtattattgttttttaaaaagttaaatgttaattttttaaaaggattagggcgggttggaatcgtcgcggggataggcgggcgggacgcgtcgtagtgttcgttttcggttgttagaaatgcggtgagtcgaaatttaaatgttttttcggagacggggataagttagcggttgcggagcgatttggtttatataggcgatatgcggtttttattttaaggagtttaggatgtaaggggttttttgtttatcgtaaagtaatttttagttttttaaaatttagagagtaattaatataataaagtaggaatgttcgatcggtcgggagttagcgtgaatatatttataaggtagaaatttcgaaagggtagttttaaaaattattttcgttttttttttgttttttttttttttattttgataagttattttatttcgatttagttttggattattttttattttagttttagttattataattattttgagaaaagtgttaatagcgtaggaatgggagaaaagatattttatttaggtattcgatttattttagtattaaagtgataaaaaaataaattaaaaggtaagtggatttcggtgtttatttggttttttattattcgaaaaaaatttagcgtttaagtagttgtaaggagagttttttagagaagcgggttttggtagcggcggggaagtgtttttaaatgggtagaatagttttttcgcgtcgggagagtcgcgtttttgttcgggtgttgtaagttttagtgtaaagtgttcgttcgttgttatgggtaaagtttcgtggatgcggtaagggttgcggatcgttggttgggggattagcgggagggttgggttagaggcgaagttttttattcgtttcggatttttttttttaggacgttcgtagcgtagttttgttcgttcggtttttttattttagtcggtcgttcgttcgttttttttgtttttcgttggaattattatagcgagttagataaagtttcgaaaatcggtttttatatttagcgcgattttttttttcgttttttttttcgttaagtttttgagaagttttgtttttttcgaggtaggaggggagttagggacggtcggggttcggcggtggcggtcgcgagtagtatagttcgggggtttttagtcgtttagattttcgtattataaagggtcggtgggcggagattagcgagagaggattttttttttttttttttacgttttttgttttgggaattcgggaggggcgtttatggggagggtggggagggtggggaaggtggggaggagatttagtcgggtagtcgagtattttagttttaggatgtaaatagagtaagagagtcgtatgaattaattacgcgcgtttattatttttttttgtttttttttaaattttttttttttttttgttgttttttcgtagtagtattgtttgataaatcgtatttttgttttgtgagtataaattatcgtaggcggaatagttgttttttatatagagaacgtattgcgcgtttatcgttacgttacgcgcgtattaggttgtagggcgtttcgttaaggttggggaaagggtcgcgttttgattaagagttttagggagagtggaggaaagaagggtattaatgggcgcgcgtttagagcgtgggatgttagtgtagatagggaggaatgatagaggtataaggaggaaaacgatgtttagaatgattaaaataatttagtaacgtattgttacgtatatttggagagcgcgttatgaataaatttttattgtatttgttggggggagttatgtattatgtattatgtatgtatagttatttggattggatattttttatttagattgagttttttaatttgttgttaaagtagtagatatcgttttttttgtttcgtttgtttaggttttcgtggggtttcgtgcgggaggcgtttgtttagttttgagatgtgtttgtttgttttagagttgggttagggcgagagggaggttgtttgttttttgttagtttgtattttatcgttttatttttacgttttttatacggagtttttaattttttagttaggttttagaagagataaattttttttgcgttttgtggcgtcggtttgtaatagtttcgggttgtcgggtttgggagaaattaaaggtgttagacgggagaatatgggaggggtagggggtattcgaatcgcgggatcggattttttaaaaggggtaagtggagagtttgtggatcgagtcgggggagttagtagagatttttgtgaaaaaaatcgttaattttttttttttcggataaatcggacgtttaatttttttttaggttttttttttttttttattattggaaatgcggttatgtataaaaaatgtatcgattttgattaaagaagaggagaggagtattattttcgtgtttttttttgggggggggggggagttttgagttaattaaaatttggttgttttttaggtattaattttttagtttattgatttataattttttttgaatattagtgaaagtgtattgtatgtaattcgtaaacgtgtatttatattttatttacgtttcgatttagttagttgtttagttttatatatgatttgtttgttttttga

SEQ ID NO: 99 - DNA, 4501 bp, Artificial Sequence
  chemically treated genomic DNA (Homo sapiens)
aagttgttttaggtgtagaaattataaagtaagtaggagtaggtttttgtttttaagatgttttatatgtagtatagatttaacgtatttaaaacggaaggttgttattttttttgtttttttaatttatataataatatatattcgtgttttatgttttaattatattgaattgtttgttttttttattttcgtttgttaatagtgagtagtttggtgtttttagattataggggtgggagggaaagagagagatagtagataattaggttggggtagatagatattagattttgatgttaggtggaggaatttagatgtattggttgttgttttaagttatttttttttggtttaaattttagattggtcgtatagtttaatttttttttttttattaaaggttatttgtgtagaagatgatataaagggggatttagtacggtgattcgtgtttgtaatttttgtattttcggaggttaaggagggaggattatttgagtttaggagttcgaggttgtagcgagttatgatcgagttattgtattttagttttgacgttgagtgagattttgttttttaataaaatatatttaaaatttaaaaagaagattatataaaggggttatttattattttggttagtaatgtagggtaaaatttgaaataatttggttttgtagtattttttagatgttaaatttttattttttattgtatagtttttatagtgttttgtgtgagatgagagggagtatggcgggttttagttggttttgttttgggaaaaattttttatttttgtatcgtttttttaaagcgggggttaagttagcgtcgtttgtttttttatttagattagattttttttttagatgtttttatttttttgaagttttataataattttgtgaggtaagtattattatttttttattttatagatgaaattgaagtttaggaaggttacgtttcgggttttaaatttcggaattttcgtttcgatgttatttaggtttgggttattgagtttaagaaacgggtcgacgggtgattagacggacgtcgggattagtttaagtttagggttgagggtcgttaggtggcgcgtttttttttttttatttttcgcggcggttcgggcgtatttgaatttagcggggtgcgtcggggaaagtaggcgcgtagggtggggcggggagtagttttaattttttagttcggagtgggtaaggagtacggtttagtttagtcggttggtatcgttaagcggtcgtcgggtcgtattagttttttttttgtttgcgttttttagcgtgtaatttatttggggggttatcggggattgaacggagcgggcgagcgttgttaggaggtggggtcggttttatttgtcgattgttcgtagtaggtagggagagggcggggtttgttttatagggttcgttttttagtttttgggtttcgggcgcgcgacgagatataaggtagttaggaaataatgcgtttgtagttcgcgttttcgcgtcgatttcgagagcgttcgggtcgtcgtgcgcgagcgagggagggcgcgcgcgcggggggggcgcgtttgtgagtgcgggtcgcgttttcggcggcgcgtatgtgcgtgtgtgttggttgtcgggttgtttcgagtcggcggggagtcggttcgttttaggtggcgggcggttggagcgaggtgaggttgcgggtggttagggtacgggcgcgggtttcgcggtgcgggttggttgtaggttgttttttgggtacggcgcgttttcgttcggtttcgtcgggttttgggagttgcgtttcgggcggcgttggtaaagtttgttttgaattcgttgtttatagtcgggttcgcgcgttgcgattggttttttttattattttgattcggggttcggtttttcgggacgcgaggattgggcgtaggttgtaagttggtggggttggggaggaacgagagttcggtagtcgattgtgtcgagggattcggggatatttttttcgttcggtcggtattcggttagtacgtttttttttttttttcgtagggagcggatatggattacgattcgtattagtattatttttacgattatgattgcggggaggatttttatcgttttacggcgtttagcgaggatatttggaagaaattcgagttggtgttatcgttttttacgtcgtcgttttggggtttgggtttcggcgtaggggattcggttttcgggattggtttttcggagtcgtggttcggagggtgtatcggagacgaagcggaatttcggggttattcgaaaggttggggtaggaattacgtttttattatacgtcgtgattgtatgtggagcggtttttcggttcgggaacggttggagagagttgtgagcgatcggttcgtttttggcgcgtttcgggggaattcgtttaaggcgttcgtcgtttcggattgtatttttagtttcgaagtcggtaattcggcgttcgtcgttttttgttcgttgggcgaatttaagatttaggtttgtttcgggttcgagagtttaagcgattcgggtaaggattttttcgagttatttaagagggggttattttatgggtggttaaagttttgtttttgtttgaggttaggtattggttttttttaagtttttgggttattttcgtttttttttggttgaagttgttcgtgtagtttttaatcgtgtttgtttggtacgtgggtgtgttggtaaatagtttggaaaagtggcgtgggagttagtttttttttgatgattattggagttttaggggataagggatttgaggtgagggttggcgtttagagaggataatattggggttggattgtaagggattgaagggggtattttaagagatattttaaatttgaagtttttttgttgttgtttttttttttaggaaatttatatttttttagggggagaagaagtcgagagttttttgtgtaaagttaaaattttcgtttttttaaaaatttaggtttttagttggttttattttaaaatgttaataataaatgtttttttttcgtgtttttttattattatttattattcgtgtatttttgagatagggagggaagaatgaatattttttattaatagatggaaaaattgaggtttagagatagataattattataagttagttttagttttttgttatttagttagttttttttttttaatgttttattttaattaggtattttttttttgatgtttggggtttttgtggtagtttattttagaagtattatattttgttttgttgtttgttttgagatggaaaagtgttttttttgtttttttttaatagatttttagcgttagttgttttttggtatttaataaatatttattggtttttattttgtggtaatttgtgggttatatgttggggttaaggtagtagaattttaggttttttttttttatttttgatgtaagtgtaatttcgttgagggtagattggggtattttgtgttattaaattatattgtttttattttggtattttagatttttatattcgtgagaaattttggagagggtatttttgtagagtgtagattgtggttagtgataaataaattaggattaagaaagtttattgtagtttttaggaataatttttatacgattatttgatagggaattggggaatggggtatggaagtttttttatatttgagagaaaaaataggataataaaaattaaaagtttttttttttttggtttattgtgttaaggttatttttaattagtttgttttttatattaagagtttatgtttgtttaatggttggaaagagaattttgagattaaaaaattaataaagatgtatttttataacggttggtggagtggtagagtggaaagagtattgttttggaagttggatattttagtttgagatttagaacgttataaaggtgatatgtggatttcgttgatttgggttttagtttttttatttgtatacgatggggttggatttgattgttttgttgatgatatttttttgtttggatagagtaagatattattttttgaaagggagaatggtgttttaaattattttttttttagatagaatttttttgagttacgaggtttaatattgaaaattaaaggtttgggatgtagggaagtttgttgaattattttttaatttattttttaatttgaatttgtttgtgagtttttagtttatttataggttatatggtttggaataaaatgtaatagattgtaaataatgaggcggggggtggggaaagtgattggtagtagagtttatttaataggggttaggggttgggtaagatagaagtttaaatatagcgtaattagttaattatgggttttggggttaggagggttgaatggttaggtttattaatggagaaataatgcgattgtttatataatggaagtttttttgataaa

SEQ ID NO: 100 - DNA, 4501 bp, Artificial Sequence
  chemically treated genomic DNA (Homo sapiens)
tttgttaggaaggtttttattgtgtggataatcgtattatttttttattaataaatttgattatttagtttttttggttttaaagtttatgattggttgattacgttgtgtttggatttttgttttatttagtttttagtttttattgggtgagttttgttgttaattattttttttatttttcgttttattgtttgtaatttgttgtattttgttttaggttatgtggtttgtgagtgaattagaagtttataaataggtttaggttaaagggtaggttagaaaatgatttagtaggtttttttatattttaaatttttaatttttagtgttaagtttcgtggtttaggaagattttatttaagaaagaaataatttaagatattatttttttttttagagagtagtgttttattttatttagataaggaaatgttattagtaggataattaagtttaattttatcgtgtgtaaatggggaaattgaggtttagattagcgaagtttatatattatttttgtaacgttttggattttaaattaaaatgtttaatttttaaagtaatgttttttttattttattattttattagtcgttgtagagatatatttttattggttttttgattttaagattttttttttagttattaaataaatataaatttttggtgtagaaagtaagttggttaaaaatgattttaatatagtggattaggaaaaaaaagatttttaatttttgttattttatttttttttttaagtgtaggaaaatttttatattttattttttagttttttattaaatggtcgtgtaaaagttatttttaaaagttatagtgagtttttttggttttaatttatttgttattagttatagtttatattttataaaaatattttttttaggattttttacgggtgtggaggtttaagatgttagaataagaataatgtagtttagtggtataggatgttttagtttgtttttagcgaggttgtatttgtattaaggatgggagaggagggtttggagttttattgttttgattttagtatgtagtttatagattgttataaagtaggggttagtgaatatttgttgaatgttagggagtagttgacgttggagatttattgagggggagtaagaaggatatttttttattttaggataaatagtaaggtaaggtgtagtgtttttaagataagttattataaagattttaaatattaaggaagaggtgtttggttgggatggagtattggggaagaggggttggttagatggtagaaagttggagttgatttgtagtgattgtttatttttaagttttagtttttttatttgttaatggggagtgtttatttttttttttttgttttagggatgtacgagtggtaagtggtggtggggaggtacgagaagagggtatttattattggtattttaaagtaaagttaattggagatttaggtttttaaaaggacgaaggttttggttttgtataaaaggttttcggttttttttttttttaggggagtgtgagttttttagggaaagaggtagtagtaaaaaaattttaggtttggagtgttttttaaggtattttttttaattttttatagtttaattttagtattgttttttttaagcgttaatttttattttaaattttttgttttttggggttttaataattattaaagggaggttggtttttacgttatttttttaaattgtttattaatatatttacgtgttagatagatacggttggggattatacgggtagttttagttaaagagaggcggagatggtttaagagtttgagaagagttaatgtttgattttaggtaggggtagagttttggttatttatggggtggtttttttttggatggttcggggaggtttttattcgagtcgtttgggttttcggattcggagtaggtttgggttttgggttcgtttagcggatagggggcggcgggcgtcgggttgtcggtttcgaggttgggagtgtagttcggggcggcggacgttttgggcgggttttttcggggcgcgttaggagcgagtcggtcgtttatagttttttttagtcgttttcgggtcgagaagtcgttttatatgtagttacggcgtatgatggaggcgtagtttttgttttagtttttcgagtggtttcgggatttcgtttcgttttcggtgtatttttcgggttacggtttcgggggattaatttcgggggtcgggttttttgcgtcgggatttaagttttagggcggcgacgtggggggcgatggtattagttcgaattttttttagatgttttcgttgggcgtcgtggagcggtagaaatttttttcgtagttatagtcgtagaaatagtgttggtacgagtcgtagtttatgttcgttttttgcgggagggaaggggggacgtgttgatcgggtgtcggtcgggcgaaggaggtgttttcgggtttttcggtatagtcggttgtcgggttttcgtttttttttaattttattagtttgtagtttgcgtttagttttcgcgtttcgggaagtcgggtttcgggttagagtggtaggggaagttaatcgtagcgcgcggattcgattgtgggtagcgagtttaaagtaaattttgttagcgtcgttcggagcgtagtttttagggttcggcggggtcgggcgggggcgcgtcgtgtttagaaggtagtttgtagttagttcgtatcgcgggattcgcgttcgtgttttggttattcgtagttttatttcgttttagtcgttcgttatttggagcggatcggtttttcgtcggttcggggtagttcggtagttagtatatacgtatatgcgcgtcgtcgagagcgcggttcgtatttataagcgcgtttttttcgcgcgcgcgttttttttcgttcgcgtacggcggttcggacgttttcgggatcggcgcgggagcgcgagttgtaggcgtattgttttttgattgttttatatttcgtcgcgcgttcgggatttagggattggggggcgggttttatgggataaatttcgttttttttttgtttattacgggtagtcgataggtggggtcggttttattttttggtagcgttcgttcgtttcgtttaattttcggtagttttttaaataaattgtacgttggggagcgtaaataggaggagggttgatgcggttcggcggtcgtttggcggtgttagtcggttgagttaaatcgtgttttttgtttatttcgagttggggaattagggttatttttcgttttattttgcgcgtttatttttttcggcgtatttcgttgggtttaggtgcgttcgagtcgtcgcgaggggtagggggagggaaacgcgttatttggcggtttttagttttgaatttgggttggtttcggcgttcgtttggttattcgtcggttcgttttttgagtttagtggtttaagtttggatggtatcgaagcgaagatttcgggatttagagttcgaaacgtaatttttttgagttttagttttatttgtaaaatgaagggatggtaatgtttattttatagggttgttgtgaggttttagggaaataagagtatttagggaaggggtttggtttaggtggagaggtagacggcgttggtttagttttcgttttggggaggcggtgtagaaatgaggaattttttttagggtaaagttagttgagattcgttatgtttttttttattttatataaaatattgtaggagttgtatagtagagaatgaggatttggtatttggaaaatattgtaggattaagttgttttaagttttgttttgtattgttggttaagatgatagataatttttttgtataattttttttttaaattttaaatatattttgttaagagatagggttttatttagcgttaaggttggagtgtagtggttcgattatgattcgttgtagtttcgaatttttgggtttaaatgattttttttttttagttttcgaaagtgtagggattataggtacgggttatcgtgttgggtttttttttgtgttattttttatatagatgatttttggtggaagagaaaaaattaaattatacggttagtttgagatttaggttagaggagagtaatttgggatagtagttaatatatttagatttttttatttggtattaaggtttggtgtttgtttattttagtttgattgtttgttgttttttttttttttttttatttttgtggtttaagaatattaaattatttattgttggtagacggaagtgagaagggtaagtaatttagtgtggttggagtatgggatacggatgtgtgttgttatatgggttgggaaggtagggaaaatgatagtttttcgttttagatacgttgggtttgtgttgtatgtgggatattttgaaggtagaaatttgtttttatttgttttgtgatttttgtatttagaatagttt

SEQ ID NO: 101 - DNA, 4501 bp, Artificial Sequence
  chemically treated genomic DNA (Homo sapiens)
atatatttgtaagaaaagttagattagagtgaagtaaagttaggatttgatggtggcgggaagggaaggggttaatgttgttgttggatagaggggtgttattttttttagaagaatagtatgtcgtggttattattataataatagttgatataattattatgggttggggatttataagagtttttataatttttaggtaggaggtattacgaattttattttataattgaggaaattgaggtataaagaaacgaagtagtgatagtagtttttttttttttttttaatagtttggaattaagttgtttgagtcgaggttgggttttaggaggtgtggatagtatttttatttcggtaaattagattcgtttgtttataattggggagaatggtggttttgaaaaggttaatttgggagttttggggacggttgtagggaacgtacgtttattttttttaggaagtagagttaggtcgttttttttttcgtagtggtgaggacgcgtggatagtttcgcgggggcggcgggagatttgcggagtggtcgtattttaggttcgcgttaaggtcgggtagtttcgttttttgtttagttttcgcgaggtgtcgttttcggtcgaagaaattatcgcggcgttattttcgtagttcgtatttatttatttatttatttttaaataaggggggcgtttttttttttttaatttgaaattggaaatatttagaggttttgtttttaagggggcgcgttttttttttgttattttgtattttcggattagttttttttcgtaattatataggagtaatttttttgtaaggttttgtttaacgttggtttcgcgtttagttgtataatacgtagttaaagcgggggttgggttagaagtatcggttttttttttttaatatatattttcggagtttttcgtaattttttttttttttaatgataagtaattgttaggttcgtagggtgggtgttgtattgtatcgtttcgcgcgtagttggtttttagagtgtagtcggtgtaagttcgggggtttaaaagggcgggaggagtatattttgggttttttagttttgtagttttttttttgtaaagaaaagtaagtggtttttggcgcgaaagttttggcgttttttttgatttttatggaaattaggagggcggggtaaagtcgtttttttttttttttttttttttttttgtttgcgttatagttttttttttttttcgtttttcgggtgtgttagattttttagttaataatatttttcgagttttaaagcgtaggttgtgatagttatttgtttggacgcgttgggtggatgcggggggtttttgggaattgtgttggagtcgagtaagcgttagttaggcgtaagcgcgtatagattgtagttattcgaggatattttcgttttttcggtttattcggagatattcgcgtagaatcgttttcggattttttgtagtcggcgggaggtaaggagtagggtttgtaaatcgttcggcgtttagggaagcgacgagcgtcggggtaaggtaagttttggacgggattgcgacgtgcgtatcgggcgttttaatatgttcgggggattgtttttgttttcgaaataaaattatttttgggtttttttagaaaagttagttttagtttcgaaggtattttggttagaggagattcgttttaatttttttgtagtttttatcggggggagtaatggtttttgcgaaaagaaattttttcggttttagaagatttgtttgtgtttgagttgtcggagagtcggtgcgtttttattttaggttggggtttttttttaaagggtgtttttggaggaagaagagggggggattaggtagggcgaggtcgtcgcggtcgtaatttgggttacggttgttttagtttggaggagaggcggttttttcggcgatttttttcgcgcgggcgtttttgttattttcgggaataggggtttagtttttttttttttggaagaggacgttgtcgtgggtttggaagagtaggggtgggtttagagagtttttaattaagttattggtaggagtatttttgtagcgggtgaatgtcgaggggcgtttgtttaaatttggggaggggaaggatttgtggatatgggtgtttgttgttggtttttgtttagagaaaggtttttttttatttgtaaagttttttaaattttttgttattatttgtatttttgaggttgtatttttataaagggggtagaaggtattttaaatattattttcggtagttgggtcggagagtttggggttttttttgagtagtcggttttatatcgttgcgagtgcggttgtttgcgtgttcgtgagagttagaattttgtagttaggaatagtttttttttttaggtagtgttttgtgtgaatgaaatggtagtttttaaagttgcggagtttcgttattattttttgtatttgtatgtttttttttattttttgtcgtagatagtttgtatataaaaggagggcgggagggagggagcgagaggtataattttttttattttcgggagtagtgggtagagtggggggtttggagggaagattggggaatttggttagagggggcgtttattgtttattttttcggtttgtttcgtttgtttatttttttcggtgtgtttgtcggttgtagtgttggaggtcggcgtcggttttcgtttttcgcgttttttacgggaaggaagtattttcggtattaaaacgaacggggcggaaagaagtttttagtcgtcggtcgggaggcgagtcgatgtcgagttgttttacgtttattatgtcgggtatgatttgtaagaatttagatttcgagtttgattcgttatagttttgtttttattcggacgaagatgatttttatttcggcggtttcgattcgattttttcgggggaggatatttggaagaagtttgagttgttgtttacgttttcgttgtcgtttagtcgtggtttcgcggagtatagtttcgagttttcgagttgggttacggagatgttgtttgagaacgagttgtggggtagttcggtcgaggaggacgcgttcggtttggggggattgggtggttttatttttaattcggttattttttaggattgtatgtggagcggttttttcgttcgcgagaagttggagcgcgtcgtgagcgagaagttgtagtacggtcgcgggtcgttaatcgtcggttttatcgtttagttttcgggagtcggcgtcgttagttttgcgggtcgcgggtacggcggggttgcgggagtcggtcgcgtcggggtcgttttgttcgtcgagttcgtttattcggtcgtcgagtgcgtggatttcgtcgtggtttttttttttttcgtgaataagcgcgagttagcgttcgtgttcgtagtttcggttagtgtttcggcggcgggttttgcggtcgtttcgggggcgggtattgtcgttttagtcggggtttcgggggtcgttttttcgcgtttaggcggtcgttagattagcggcggcgattataaggtttttagtattttcggagaggatattttgagcgatttaggtaaagatcgaattcgggttcggttgtttttttggggtattggatttcgggtcgcgttttttttgttagtgttcgtatgttttggtttggggagtattttggaggtagtgttaggggtagagaggttttgttttttttaagttttttttcggggtaaagagaaggggttgagagaatgtcgttgtaaaaggggtgttttttaattttcgtttttattaaagttttttttatttttttttggggagtttttttttaggttattacgggtttttattcggttttttattttttttttgtagcgtagtttgaggaataaaattggagaaagttggtggttaaatcgggtgggggtttagggggttgttgggtgtattgtttggatagaaatttgttagcgtaggggtgaaagggattttttggtttaggttaggggagggaaagatattttcgagaagatttaagggttgtgtaaagttttgtttaaggcgtaggaatttataggagggttgtaatagatggttagagtcgattttttattttttttttttttttttttttttttttaaatgtcggtatttttttttttttttattttcggtgggtggtgggttatttgtttttggtgcgtggttagtaggcggcgatatgcgaggttagtaggcgggttcgggatttgaaaggttgggggtggtgggggtattttttttttttttatttagtagttggttgtaagtgtaatagtagttgtgtatatttttagggggttttttttttttagtgtgtagtggaaagtggttgtagttttgttttttagtttgaattttaggtttaatttgagatgtgagttgtatttgtaatttagtgtttttgaaggtgagggtaggtatttagtagtt

SEQ ID NO: 102 - DNA, 4501 bp, Artificial Sequence
  chemically treated genomic DNA (Homo sapiens)
ggttgttgagtgtttgtttttatttttaagggtattgggttatagatataatttatattttaaattaggtttggaatttaggttggaagataaaattatagttattttttattgtatattggaaagaggaggttttttgagaatgtatataattgttgttgtatttgtagttagttgttgaatggagggagggagggtgtttttattatttttagttttttagatttcgggttcgtttgttggtttcgtatatcgtcgtttgttggttacgtattaggagtaaatagtttattatttatcgaggatgggggaagggaaaggtatcgatatttgaaaaaaaaaaaaaaaaaagaaaaagaatagaaaatcggttttagttatttgttgtaatttttttataagtttttgcgttttaaatagggttttgtatagtttttgaattttttcggggatgttttttttttttttgatttgggttagagagttttttttatttttgcgttaataggtttttgtttaggtagtgtatttagtaattttttaaatttttattcggtttagttattaattttttttaattttattttttagattgcgttgtaaaagagaggtgggggatcgggtgagggttcgtgatggtttagaggagggttttttaggagagggtggaaggaattttagtgaaggcgagaattggagagtattttttttgtaacggtatttttttagttttttttttttatttcgaggagagatttgggggaaataggatttttttgtttttagtattgtttttaaaatgttttttaggttaagatatacgagtattaataaaggggacgcgattcggggtttagtgttttagggaggtagtcggattcgagttcggtttttatttgaatcgtttagggtgtttttttcggaggtattgagggttttgtggtcgtcgtcgttggtttggcggtcgtttgggcgcggaggggcgattttcggggtttcggttggggcggtaatattcgttttcgaggcgatcgtagggttcgtcgtcggggtattggtcggggttgcgggtacgggcgttggttcgcgtttgtttacgggaaaggggaagattacggcgggatttacgtattcggcggtcgggtgggcgagttcggcgggtagggcggtttcggcgcggtcggttttcgtagtttcgtcgtgttcgcgattcgtagggttggcggcgtcggttttcggggattgggcggtggaatcggcggttggcggttcgcggtcgtgttgtagtttttcgtttacggcgcgttttagtttttcgcgggcggagaagtcgttttatatgtagttttggaggatgatcgggttgggggtgaggttatttagtttttttaggtcgaacgcgtttttttcggtcgggttgttttatagttcgtttttaagtagtattttcgtgatttagttcgggggttcggagttgtgtttcgcgaagttacggttgggcgatagcgggggcgtgggtagtagtttaaattttttttagatgttttttttcgggggggtcgagtcggggtcgtcgaagtagaagttattttcgttcgggtagaagtagggttgtagcgagttaaattcgaggtttgggtttttgtagattatgttcggtatggtggacgtggagtagttcggtatcggttcgtttttcggtcggcgattgagggttttttttcgtttcgttcgttttaatatcgggggtgtttttttttcgtggggggcgcggaaggcgggggtcggcgtcgatttttaatattgtaatcgatagatatatcggagagggtgggtaaacggggtagatcgaggggataggtaatgggcgttttttttaattaggttttttaattttttttttaagttttttattttgtttattgttttcgaaggtggaggaagttgtgtttttcgttttttttttttcgttttttttttgtgtataagttgtttacgatagggggtgggagggggtatgtagatgtagggggtggtggcgaggtttcgtaattttggaaattgttattttatttatataaggtattgtttgggggagggggttgtttttggttgtagaattttagtttttacgagtacgtagataatcgtattcgtagcggtgtggggtcggttgtttaggggaagttttaggtttttcgatttagttatcgggaatggtatttggagtattttttattttttttgtaaaaatgtaattttaggagtgtaaatgatagtaggggatttagaaaattttgtaaataaaaaaaagtttttttttagatagagattaataatagatatttatatttataaattttttttttttttaaatttgagtaaacgtttttcggtatttattcgttgtagggatatttttgttaatagtttaattggaagttttttaagtttatttttgtttttttaaatttacgataacgtttttttttagggagggagaggttgagtttttgttttcgggaatggtaggggcgttcgcgcgaggagggtcgtcgggagagtcgttttttttttaagttggagtagtcgtgatttagattgcgatcgcggcggtttcgttttgtttaattttttttttttttttttttaggggtattttttggagaagaattttagtttggggtggggacgtatcggtttttcgatagtttaaatatagatagattttttagagtcgagggaattttttttcgtagaagttattatttttttcggtaagggttgtaaaaggattagggcgggttttttttagttaggatgttttcggggttggaattggtttttttgggaaaatttagagatggttttgtttcggaagtagaaatagtttttcgggtatattagggcgttcggtgcgtacgtcgtaatttcgtttagggtttgttttgtttcggcgttcgtcgtttttttgggcgtcgggcggtttgtaagttttgttttttatttttcgtcgattgtaggggattcggaggcgattttgcgcgggtgttttcgggtgggtcgggggggcgggggtgttttcggatggttatagtttgtgcgcgtttgcgtttggttagcgtttgttcggttttaatatagtttttaggagtttttcgtatttatttagcgcgtttagatagatgattgttatagtttgcgttttgaagttcgggggatattattaattgaaaaatttgatatattcggggggcggggagagaagggggttgtggcgtagataagggggagggagaaaggagaggaaagcggttttatttcgtttttttgatttttataaaaattaggggaggcgttaaggttttcgcgttaaaagttatttgtttttttttgtagagagaaggttgtaaagttgggaagtttagggtgtgtttttttcgtttttttggattttcgggtttgtatcggttgtattttgagaattagttgcgcgcggagcggtgtaatgtagtatttattttgcgagtttggtaattgtttgttattaaaagaaaaaaaaattacggagggtttcgggggtgtgtgttggggaggggagatcgatgtttttaatttagttttcgttttgattgcgtgttgtgtagttgagcgcgaggttaacgttgagtaaggttttgtagggaggttgtttttgtgtaattacgaaagaaggttagttcgaaggtgtaaaatagtagggagaggacgcgtttttttaggaataagatttttggatgtttttagttttaaattgaaagaagaggggcgttttttttgtttgaaaataaataaataaataagtgcgagttacgagggtggcgtcgcggtggttttttcggtcgaaggcgatatttcgcggagattgagtagaaagcggagttgttcggttttggcgcggatttggagtgcggttatttcgtaggtttttcgtcgttttcgcgggattgtttacgcgtttttattattgcggaggaggaggcggtttggttttgttttttagggggaatgggcgtacgttttttgtagtcgtttttagggtttttaagttaatttttttaaagttattattttttttagttatgggtaggcgaatttgatttatcgagatggaagtgttgtttatattttttgagatttagtttcggtttaaatagtttgattttaaattgttgaagggaaaaaggaaagttgttgttattatttcgtttttttgtgttttagtttttttaattgtgaaatggagttcgtagtgttttttatttgagagttatgaaagtttttataagtttttagtttataatagttgtgttagttattattatgatgatgattacgatatgttatttttttggggaaaataatatttttttgtttagtagtagtattggtttttttttttttcgttattattaaattttggttttattttattttggtttagttttttttataggtgtat

SEQ ID NO: 103 - DNA, 1446 bp, Artificial Sequence
  chemically treated genomic DNA (Homo sapiens)
ggagtcgttgggtttaggatggataatggttttcgttggtgtatgagatttaggttatttttttattttttgtggtttatttgtttatattgattgattgattggttgattaagatggttttgttttgttgtttaggttggagtgtagtggtgtagttataggttattgtagttttaattttttgggtttaagtgatttttttattttagtttttggagtagttgggaatataggtgtgttattatattagattaatttttatttttttttgtggagacggggttttattgtgtcgtttaggttggtttggaatttttgggattaagtaatttttttgtttcggtttgttaaagtgttgggattataggtatgaattacgggtttttattattacgttttaggaaatgtttatattggagtgtgttttttgtttttagttgggttttcgattggttattgtggtttaatggagtgtggtgtcggtagttgttagcgtttgttttttgagaggggtggcgaggggtatataggattagattgtttttattgttggatgattgggtaagtcgttttttttttttgggtttttgttttttaatatttaatattttgttgtgggttaagtgaagtttaagtttttttcgattttaatatgaggttgtttcggaatatttattttgtgttttgaatttaataatcggttgtggagggtattataggtaaatttgtattgtgagtgggttgttgttatttaattatttgatagtagttgcgaataggtgggtagtgtgttttttataggtagcgacgatttttggaggtggatttagaggtataattaagtcgcgcggcgtattagggtttaagggtatggggttttcgtagttgtggttggggtagagttggggttgtttttttttttaggagtataggcggcggtttagttttacgtttttcgtttttagttatattcggttcgcgtagtggggggtttaatagatttttttttttcgggttttagttttttcgttagtaagggcggataaggatttttttcgtttcgttagaggaggcgatcgaggggtttgagtttaggtataggtcggcgggtttaggaggcgcgaggcggatcgaattcgcgggaggagtaaagatttttgatgcgcggtcggagggcggggcggaggacgggatttacgcgattggtattttgtttttcgttttagttaatgagcggcgagggtgttttgggggcggggtagaattagtttttaagttgtagtgacgtttcggcgttattgttgcgttttatagacgtcgcgtgtattcggttgtttttaggcgttgttaggtatcgtttgggcgtcgttgttttggggttttggttcgggtttggtcggggttttttgatagcggcgggggaggcgggcgggcgtagggtgtcg

SEQ ID NO: 104 - DNA, 1446 bp, Artificial Sequence
  chemically treated genomic DNA (Homo sapiens)
cggtattttgcgttcgttcgtttttttcgtcgttgttagggaatttcggttaggttcgaattagagttttaggatagcggcgtttagacggtatttgatagcgtttgaggataatcgggtatacgcggcgtttatgaagcgtaatagtgacgtcggagcgttattgtaatttaaaggttgattttgtttcgtttttaagatattttcgtcgtttattggttggggcggagggtaggatattaatcgcgtgggtttcgtttttcgtttcgtttttcggtcgcgtattaaggatttttgtttttttcgcggattcgattcgtttcgcgttttttgagttcgtcggtttgtatttgagtttaggtttttcggtcgttttttttggcgggacgagaagagtttttgttcgtttttgttgacgagaagattgaggttcgaaaaggaaaagtttgttgggttttttattgcgcgggtcgggtgtggttggaggcgagagacgtgaggttggatcgtcgtttgtgtttttggagggagggatagttttagttttgttttagttatagttgcgggagttttatgtttttgaattttgatgcgtcgcgcggtttagttgtgtttttgagtttatttttaaaagtcgtcgttgtttatggaaaatatattgtttatttgttcgtagttgttgttagataattgagtggtagtaatttatttatagtatagatttgtttgtggtgttttttatagtcggttattaaatttagaatataaaatagatatttcgggataattttatgttagaatcggaagggatttggattttatttagtttataataagatgttaaatattggaaaatagagatttagagaaggaaagcgatttatttagttatttaatagtaggggtagtttggttttgtgtgtttttcgttattttttttagagggtaggcgttggtagttgtcggtattatattttattagattataatgattagtcgggggtttagttggaaatagagggtatattttaatgtgaatattttttaaaacgtggtggtgggggttcgtggtttatgtttgtaattttagtattttggtagatcgaggtaggaggattgtttgattttaggagttttagattagtttgggcgatatagtgagatttcgtttttataaaaaaaaataaaaattaatttggtgtggtggtatatttatgtttttagttattttaaaggttgaggtgggaggattatttgagtttaggaggttgaggttgtagtgatttatgattgtattattgtattttagtttgggtaataaagtaagattattttaattaattaattaattaattaatgtaggtaagtaaattataagggatggagaaataatttgggttttatgtattagcgagggttattatttattttaggtttaacggtttt

SEQ ID NO: 105 - DNA, 2501 bp, Artificial Sequence
  chemically treated genomic DNA (Homo sapiens)
ttagttttttttttttcgatttcggaataattcgacgttttagtagggagtagagtttttttttgatttttgtattttttttaatgtataacgagttttttgtttcgtttttttttagatggcggatttcgtatttgtttagattttttttttaggttttcgtttttttttcgcgtgttttagggatagtttgttatagttttttttttttttcggtgttttattttgtagattttagtttttcgggttaagtaggttgtcggtgaagaaacgcgtcgggttagtaatttcgttgagtagtattagtttcgttattttttttttttattttttaattaggagacggtttttaaggttcgtttttttttattattaattaattagttgatttttttaaaaaagggggcgtttcggaagttttatcgattagtaagagatttgggtgttgagtacgtgaattaatagatgcggatgattgtgtaggcgggtttaatgggagtatagtagtaggaagtaatttttagatagtgttatatcgttaagcgtatgcgttaaataggttttagtgataaagcgtttgggagatgtagtatttagtattaaggtttattattttttttagttattattaagtttagtttagatagtttttatgtgttttcggagatagataagttttttaaaaggggcgtattgtgattattgttattttttttaggaagttaaaagttgagaatgggatatgggttgaaattttttttttggttttttatttttaaattttatagtatagattataatttataagtttttgttttttttaaggtttaatttttaattagttaaatattttgcgtagattttgagttagttttgtattttggttttttttttgaatgattattttttttagttttttttgggttgttcggtttttgggatttatcgttagtatttttttgaggttagtagttgttttttttaggtttttaagggtagtttgggtaattttttttcggtataaggtttttaaatggttaggttttcgttttaatattcggttatagttttgggttgttaattgaggttgttttagtaataattgataggtagttagattggtatgaaggatagttcgttttggagggttaggtgggggtaaagttaggagtagtcgaagagttcgtttatagtatcgggtagtttttttagggtttttagttcgaaatagttttgtgttttttgtacgtttttttttggttagggtttttttttcgttagtttttagtttttaggagtttcggttttgagtgaaggatgttagtgtgagtttgataggaggtttagagtgtttaggtagttgaagttttgtttttttattttgatatatggattttaagtatttttttatgagttttttttaagttttttttttttatggttttacgtttatagttagttttgtttagttttttggcggttttgattcgaaaggaaattttaaagttagtattcggtagtaggagtttagtttgggtttgtttaagttatggttacggattacgatttttttgataaagtttttatcggggtagtattagagattagaagtttgaagggtttttggtatttgattggttgatttatgagatttatgagagttttttttaagtttagtaattagttttttagttttttgagtatgttttagaatttggttggttggatttgggtttatttttagtttaagcgtttcggtaggagggtttcggggttgttgtttaatttgaataattgaattaaggttttttcgaaggttttttttttatttttgttgcggttgagaggtgtttttttttttaattgtattgattggtggcgtttttatatggatgtttagttttttttacggtgagtgaatagttttggttagaaagggatgaattaggtttaggttagtatttgaaaagaaaattaaataatgttaatagtagggtttttatttagatttttttttcgtttttttttatttttttgagatttaggtttttagttttgaaagtttttagttttgtttttttttaaaaatttgttttagttttttcgttttatttatatataatttagaattataaattttataattttttgcggttaaggtagtcgcgttaattacggatattcggtcgggttaataagtatttgcgcggttaaagtgtttggtatggtgataggaggagtcgggttattcgaattatttttttttttaaagttaaatggttattgaatgttgttttcggagttttgttttacgcggagagggtagtcggagaggggcgcggtgcgggaggcgggggtagggggcggaataattgggaaagatattgataattaattttggagttcgcgagatttcgaatttagttaaatttttggtagttaatcgggagaagggaggaatttggttagttcgtttattgaacgtgatattatttttttcg

SEQ ID NO: 106 - DNA, 2501 bp, Artificial Sequence
  chemically treated genomic DNA (Homo sapiens)
cggaggaaatgatgttacgtttaataggcgggttaattagattttttttttttttcgattggttgttaggaatttgattagattcggagtttcgcgggttttagggttagttgttagtattttttttagttgtttcgttttttattttcgtttttcgtatcgcgttttttttcggttgtttttttcgcgtggggtaaggtttcgagggtagtatttagtagttatttagttttggaaggagaggtgattcgaatggttcggttttttttgttattatgttaggtattttggtcgcgtaggtatttattgattcgatcgggtgttcgtagttggcgcggttattttaatcgtagggaattgtggaatttatagttttaaattatatgtgggtggaacggggaagttggagtagatttttggaggaaagtaaaattggggatttttaggattaggggtttgggttttagaagaatgggaaaggacgagaaaggagtttaaataagaattttgttattagtattgtttggttttttttttaggtgttgatttgaatttggtttatttttttttgattaaaattgtttatttatcgtggaagggattaagtatttatatggagacgttattagttaatataattggagaaaaggatattttttagtcgtaataagagtgggaaaagaattttcgggagaattttgatttagttatttagattaggtagtagtttcgagatttttttatcgaaacgtttgagttggaagtaagtttagatttagttagttaaattttagagtatatttaaggagttgaaaaattggttgttgaatttgaaggagatttttataagttttatggattaattagttagatgttagaggttttttaagtttttgatttttggtattgtttcgatgggagttttgttaagaagatcgtaattcgtggttatggtttggataaatttaaattaggtttttgttgtcgggtattggttttggggttttttttcggattagggtcgttagagggttggatagagttaattatgggcgtagggttatggagggaggaaatttggggggagtttatagagaaatgtttggagtttatgtgttaaggtgaggaagtagagttttagttgtttgggtattttggattttttgttaggtttatattggtattttttatttaaggtcgagatttttgggagttggagattagcgagaaggaagttttggttagggaagaacgtgtaaggggtatagaattatttcgagttgggaattttgaaggagttgttcgatgttatggacgggtttttcggttgtttttgattttatttttatttggttttttagaacgaattgttttttatgttaatttggttgtttgttagttgttgttagggtagttttagttggtagtttagagttgtgatcgggtgttggagcgggagtttggttatttaaaggttttatatcgaaggggggttgtttaggttgtttttgggaatttggaaaaagtaattgttgattttaagaaggtgttggcgatagattttaaaaatcgggtagtttaggaggaattggggaaggtggttatttaggggaagaattaggatgtagggttggtttagggtttgcgtaagatgtttggttgattaaaagttaaattttaaaagagataggaatttgtgaattgtggtttgtgttgtgagatttgggggtggggggttagagggaaggttttagtttatattttatttttagtttttggttttttaggggaggtagtagtggttatagtgcgttttttttgaggggtttatttattttcgaggatatatagaagttgtttaaattaaatttagtagtggttgggggagatggtggattttaatattgggtattatattttttaggcgttttattattggagtttgtttggcgtatgcgtttggcggtatggtattgtttggaagttattttttgttgttgtgtttttattgggttcgtttatatagttattcgtatttgttgatttacgtgtttagtatttaggttttttattggtcggtagagttttcgggacgtttttttttttgaaagagttaattgattagttggtgatggggagaggcgggttttgggaatcgttttttggttggggggtgggggggaaagatggcggagttgatgttgtttagcgagattgttgattcgacgcgtttttttatcgataatttgtttagttcggaggattggggtttgtagagtgaggtatcggggaggggagagggttgtggtaaattgtttttgaggtacgcgggaaagaagcgggggtttaaagaggaagtttgggtaaatacggaattcgttatttgaaggagagcggagtagggggttcgttgtgtattaagggggatataaaagttagggaagaattttgttttttgttggaacgtcgagttgtttcggggtcggggaaggaggggttga

SEQ ID NO: 107 - DNA, 3001 bp, Artificial Sequence
  chemically treated genomic DNA (Homo sapiens)
ttgttataattgggtcggtaggggaagaagggaagggggatttggatgggttttcgtaaaataggtgaaaataaggggtgaagagtaggggattgaggaatagtaaaggaaaataaagatattatttttaatagaagagttggaggggggaaaaaaaaagtaagatttaattacgattttttttttatttttagtttttattttttttaaattaggaaatttttatttggaaagaaaaatagatataaaatataaaaacgaaaagtaaatataatagaatagaaaaagtagtattagggaaagtggttaggatagaggtttttaataagattagtaattatagtagcggaaattagaaaagttggaaggggaagattaatttataaatttttgatttgaaagtaatagtgaggaaatagaatagataataaaaggtaaaatatgattaataatttagtaaagtggaaaatggagatgataagtagagttttgaaaagtttttaaaggaagatttcgttttttttattataattttatcgttatggatgtttaatttagtagttattagttaagggtgatagatgagggttattattgcgtaaagcgtttatttttcgaaaagaaaatattatatggtcgtcgtttattttttatagtttttagttttttattttttagtattttttttttcgttgtttaagtaagttttgtgtaattagtatgggggggaggggcggtgtaagataaatggttcggttataaaaaaataaaatttatgtttttattttataataagaaagttaataggtgatagagaaaggtaattttcgtttaggttttaataggatttttattaagtggttttatattattgttacgttacgaaggtgagattttttttggagaaatatataatgatattaatcgtatcgtaaatatttggaaggtattttaaattaagttgggtaagttaaggtgagaaaaatttaattgggtttagaaattagtttttttttttagttttatcgagggtcgaaaaagagtttaagaaagaataaggaaggtgagaagagtttcgtttttcgtaaatattaagattaagggacgtcgagtatcgttttttattgatgttgaggtttttaatatgagaagaatttattggaagaagggagtaaaacgaatataatggcgtcgaggatattattttggattgggtttttttttagtttttttttttttttttaggagttttttgttttcgaaagggatgtaagttaaggaaatagcgaattaattaggttttagcgattagattatcgtttgtgaaaagggtattaggaatttatgtgacgggatgggtgcggagaagcgtagatggaaacggattgtagcgaaggttaaagtttatttaaatagggagagcgcgtatggcggtagtaatagcgacgaaggagggaaatttgtttttattttcggttgtaggtttttttttattttagtttttcgtttttttggttgtaagagcgtaggcgtaagggatcggaaatagggtttttcgcggttatatagattcgtgcgttttaggtttgtttttggaaaatgtttgtttgaaatttgttttaaaatcgtttttaattttattgttatcgttagtaataaaagatataaaggaaattaacgtttgttttttattgttatttttatttttttattttatttttttttatgttttttattttttcgtttaggtttttgttacgtaggttttttttgtaggtattttttcgtggatgcgcgaggaacgagtgtggcgaaggttgcgagtttttacggggtttttggttcggtagtgaaggtgatttgaggattgttgggtacgtattaggaatcggtaggttttagttgaggggagggaggagggaagttttagggaattggattgttcgggggtgtttttcgatttttttttagtcgtggggttggtgggcggtatttttttaaaaggatgttgttcgaggtagttgatgttttagggttagtgagttaggaaggtgttttgaattcgagcgggaagacggggtttggattcggttttaagtgttaatagtagggtttgagggttatattatattttattaatattgtttttgtttttgttttgagatagagtttcgttttgtcgtttaggcgggagtgtaatgttttgatttcggtttattgtaatcgttgtttttcgggtttaagcgatttttttgttttagtttttcgagtagttaggattataggcgttcgttattacgtttagtaaatttttgtttttttagtagagacggggttttatttatgtatgattttaggtgatttatttatttcggttttttagagtgttgggattataggcgtgagttatcgcgttcggtttattaatattgttaattcgagtagaatgtttttggtttcgttttaatagttttattgtttaatttggattttttttttgaatgaaatatttgttattttcgtttttgagatggggagttataaaagtaagatttgatgttttgttgtgtaataaaataataaacgtttggttttttttttgttagtatatttaattatttaatattaaggagtaggtatcgttatttttattttattgatagaagcgaagtaaagtaatatattttaagtagtacggttggtgaggttatagttaggatgtaaatattttttattttttattgtattttgtttttttgtttaaagaatttggttagtaaatatattgtaggttattttattggtttaaatttttggtgaagtaagtttgtttttagtgataaatgaagtaattaatttaagaatggtgttatagaaggtatttttttaagtattatttaatttatttaaaagtatttattaattgttttttttgtgttatatgttgttttaggatttggggatataacggtgaatagttttgtttttatagtgtttatat

SEQ ID NO: 108 - DNA, 3001 bp, Artificial Sequence
  chemically treated genomic DNA (Homo sapiens)
atgtaaatattgtgagaatagggttgtttatcgttgtgtttttagattttaggataatatgtggtataagggaggtagttgataaatatttttgaataaattaaatgatatttgggaaaatattttttatgatattatttttgaattagttattttatttgttattgaagataagtttattttattaagaatttgaattaataaggtaatttgtagtgtatttattaattagattttttgagtagggaggtagaatataatagagaatgagagatgtttgtattttggttgtaattttattagtcgtattgtttgagatatgttgttttgtttcgtttttgttaataagatgagaataacggtatttattttttagtattaaatgattaagtatgttaatagggagagggttaaacgtttgttgttttattatatagtaggatattaggttttatttttgtggttttttattttaaagacggggatagtaaatgttttatttaggaaaaaaatttaggttgaataatggggttgttggggcggggttaagaatattttgttcgaattaatagtattaatgggtcgggcgcggtggtttacgtttgtaattttagtattttgggaggtcgaagtgggtggattatttgaggttatatatgggtgaagtttcgtttttattaaaaaaataaaaatttgttgggcgtggtggcgggcgtttgtaattttagttattcgggaggttgaggtaggagaatcgtttgaattcgggaagtagcggttgtagtgagtcgagattaggatattgtattttcgtttgggcgatagggcgagattttgttttaaaataaaaataaaaatagtattaatggaatgtagtataatttttaagttttattattaatatttggggtcgaatttagatttcgttttttcgttcggatttagaatatttttttgatttattggttttagggtattagttatttcggatagtatttttttgggaaaatatcgtttattagttttacgattgggaaagagtcgggaaatattttcgagtaatttagttttttgagattttttttttttttttttttagttagggtttgtcggtttttagtgcgtgtttagtagtttttaggttatttttattatcgggttaaggatttcgtgggaattcgtagttttcgttatattcgtttttcgcgtatttacggaggggtgtttatagagaagatttgcgtggtaaaaatttaaacgaagagatgaggggtatggagaggagtaggataagagaataaagataatagtggggggtagacgttagttttttttatattttttgttattggcggtagtagtgaagttagaaacggttttaaaataaattttagataggtattttttaaaggtaagtttggagcgtacggatttgtataatcgcggaaggttttgttttcggttttttgcgtttgcgtttttgtagttaagaaggcgggaggttggagtagagggaagtttgtaatcggaagtgaaggtagatttttttttttcgtcgttgttgttgtcgttatacgcgttttttttgtttaggtaagttttggttttcgttataattcgtttttatttgcgttttttcgtatttatttcgttatatgggtttttgatattttttttataggcgatggtttggtcgttggggtttagttggttcgttatttttttagtttgtatttttttcgagagtaaagagtttttgggggaaggaagggaagttaaggggggatttaatttaagatggtgttttcggcgttattgtgttcgttttgttttttttttttaatgggttttttttatattggaggttttagtattaatgagaggcggtgttcggcgttttttggttttggtatttgcggagggcggggttttttttattttttttgtttttttttgagttttttttcggttttcggtgggattgggaggaggagttggtttttgggtttagttggattttttttattttgatttgtttaatttaatttggagtgttttttaagtgtttacgatacgattggtgttattgtatgtttttttaaaaggagttttattttcgtagcgtaatagtgatgtgagattatttggtaaagattttgttaaagtttgggcggggattgtttttttttgttatttattagtttttttattgtagggtggagatatgaattttgtttttttgtggtcgagttatttgttttgtatcgttttttttttttatgttaattatataaggtttgtttaaatagcggaagggaggatattgagaagtgggaggttgagagttatgggaggtggacggcggttatatgatgtttttttttcgaaaggtgagcgttttgcgtagtgatgatttttatttattatttttgattgatggttgttgagttaggtatttataacggtgggattataatagggaaagcggagtttttttttgaggattttttaggattttatttgttatttttattttttattttattaagttattagttatattttattttttattatttattttatttttttattgttatttttagattaagaatttataagttggttttttttttttaatttttttggttttcgttattgtgattgttaattttgttgggaatttttgttttaattattttttttggtattgttttttttgttttgttatatttgtttttcgtttttatgttttgtatttgtttttttttttaggtaaaagttttttggtttagggaaagtgggaattggggatggaaaagaggtcgtgattaagttttgtttttttttttttttttttagtttttttgttagaaatagtatttttgtttttttttgttgttttttaattttttattttttattttttgtttttatttattttgcgagaatttatttagatttttttttttttttttttttgtcggtttagttatggtag

SEQ ID NO: 109 - DNA, 5477 bp, Artificial Sequence
  chemically treated genomic DNA (Homo sapiens)
tataaggattgtgggttttttaggggtttcgtgttaggagttagaaggggtatagattgtttttttttaatagttgtattatttgtttagagttagattgagtttggagggttttggaagttagaaggattgatatggggttggaggtagggaaaggttgttggaagagggagaaattgaggatttacggtttttaggtagtttgatttgttttaggtttggttggggtttgttttcgttataggtggttacggtttttttgtaagaattgttggggtttttattatagttgtagtatcgtattcggttttttggtaggagaaaagaggcgttggatttgggttttcggtggagtcggttggtagaaggtttgtgtgagaagttagttggtcgtttttttatttaaggtagtttttagtagggagttgagtaagattttaataaattggggttttatcgtagtttgttcgtgttaggatcgtttttattttttgtttatttttttttttagttcggttttgtttgttttatatttttcgtgttttgagttttatagggttataaaaaaggaagaaagagttttttttagtaggtattaagggttttagtggggatagggaggggttttatagtatgtttttagtattttttggagtttttaaatttttttatttttagtagtagtttgtggattaataagaatttttgaggatttttgatatttttttatagggtttttgagggttttttttttgtaattatttgtgtaaggttagattttttttatatattggattttaacgaaaataatatattttaatagattgaatgtagaagtagataggaaaatttaggtattttttacgaagtttgatattagatttataaaaatgtaaagtaatgtttagttttttattgtgttgtggagaaataatagttattttttataaaattgtattttgttagtatgtaatattttattatttttattgtttaaataaattaataaatatttattttaaattttttgttttaatttttaatgtagtaaatattgatataattttataaagaaaagttttttagagttttaagtaattttgaaaagtgtaaagaggttttgagattaatatttttgaaaagagttgtttttttgggtatttgtgttttttttatttttattttttgtttttagttttattttttttggtatatgttggttttgattttttagatgggttttttttttttttagtttttttaattttagttttttaggttgtattattatttttttattttaaattttatttatgtttttttttttagtgatttttttttagtgtaagtatattagtaggttttttagttttattcgtggttattttttttttttaaggtagtaaagttggtagggataattatagggtaggaatgttgaagtttggggggattaaagggatttgaagttgggtggggttcgtttttatatagttgggttttgtgtgtgtatgtgggtgtgtgggtgggggtattgttgattttatatttaaatagatttacgtcggggttgtttaggagggtgattttgagagatatgaaagtattgagggggaaagatagagaaaataaagatagagagaagttgagagagttagggagtagtttgagatatggggagggagggggaggagtaggagggaaggcgatagatataatttaggagtaggagaggaagttaagttatagagataatatgttgagagagtagaggagattttttaggtaagggtagattttttgtaggggtaggttgggggttttcgttgtttgttgggttaggttggtgaatttggttatggtttcgttttttagatttattttttaggtgtgtttgtttattggttttttattgttttgtttaaatgttttaattttataaatttcgggatttcggggtgtagattattttttttagatttttgagtttgtgtttggttatgggtatttttagtatttttttttgcgtgttgtttttttgtggggtattgggtaagggtgggttggggaatttttagtggttagggggttgggggtggggataagggtatgtggaggaatttgagggttggggaggagaggggtgtgggtgttggaagaggttaagaagagagttgggggagtgggggattttagggagattagttattgggaaggttagtttgatgaggtgggaaaggaagagtttttttttaaggtatttgagaataattgttttttttttgttgtatttttgattcgtttttgttttttttattttttattttacgtgttgtttttgtgttgggttttttggttaatgttaatttttatttttttatttgtttttggtgttatttatttaatttttttattgatttttttaatttttttgttgttgggtttggttttttgttttattttttttatgttggtttttgatttttgtggtttttgtttatgtttgcgtattttttaatttttgtattttttttgtttttatttttgtttttttttttgtatcgtttttttttttttttttgagatagagtttcgttttgttatttaggttggagtgtagtggtatgatttcggtttattgtaattttagttatttagatttaagagatttttttgttttagttttttaagtagttgggattagaggtatgtgttattatgttcggttaattttttgtatttttagtagagacggggttttattgtgttagttaggatggttttaattttttgattttatgattagttcgtttcggttttttaacgtgttgggattataggcgtgagttattgcgtttagttattttttttatttttgttagttttttttttttattttatagtttttttttttttgttttatgtgttatttttttttgtgattttttttcggatttggtttttgtttgttttatagggagggtttgttttttttgtttttttaatttttgttgttttaataggttttattatgttttttgttcggggaaggtttcgttgttatatttgtggttttattaaattttgttattttgtttttatcgagtgtcgggacgatgaagtttgtggtattagtattggtattttaggtaggattttggtttaatggtttttttttaggaggttttttatttttatttattcggttttttttgtggttttcgttttagtatgttttttttattttatagattagagtgagattattgagtgaaaaagttgttttttaagggtttagtgttttttgttaggttatgttatttattggttgtatttttatattttgtggtattattgttgcgagtaggatttgtgtaatatagtcgtttttttatagtagtttattagttttttcgtttttttgtttttttttgtggttagtttcgttgggagaggatattttttttattagttttcgtggatttgtagtttttaatttaggatatttttcgttattattgcggttttggaaatatttgtatagatattttgagatatgttcgagaatttaattttgtatagagattttagattttttagtagattttttatagattttttataaggtttggggaggtatttgtttagagtttaattttataaagaatatttattttgcgttttttgttttttttagatgtttattgttgatgtttcgtgttagtttaggttattggtaaggtaggtattttgatgatattgtggattttaggtaaggggattaaaggagtattaggtatggtaaggaggagagttttgttaggaaagattaatgtggtaggtcgggaatttaggatggagggtttgggggattatgaagagtatttttaataaaaggtttatttaggagtttagtaatattgtagatattgtagtgtgtgtgtgtgtgtgtgtgtgtgtgtgtgtgtgtgtgtttgtgtgtgtgtgttttaagagtaaattgtagttgtttggtgggttgggttggagttggaatttggattacggtattttttttattttttatttgtgttattttcgtttttttttttgttaatggtttagtttaagtttttgtagtttgaaggttttaggtgagatttttgagaaagtttttttttagtaaggtttaagtttgagtagagatataaaagggtatttagtggagttgtttgtgagggtgtggttggagtttagtttatttttgtttgagattagggaatggttaagttgggagtattaatattttttttcgttttattagtttagattcgtttatggtttatagatattttagtatggtttcggtttaataaataatatatttttattgggtttgttagtttgagtagatattttttttgttttcgagaaatagggtgtgattttagggtagtaggaaggaagtgttagagtggcgatagttgtttatatgttttgaatgtttcggtaaggcgttatagggaagagtgtgtgtttaggataaggaaggataaggagggggtttcgggtgggagttgagtataggtatttttattttgatttagttttttttttttgtatgtgaggaagtttggggttgattaaatatgtttgtttttttttttttttgtgaggatgagatatggggtagtgggggtttggtttaatttagagatgggttgaggttttttattttttttgtttttttatttttttattttgtgtttttatttttttttttttgtttatttttttttattttttttgatttgagttttttttttttttttttttttttcgttttttttatttgttttttagttttattgtaatggattttttattattgtttaagtttttagatttttgttttttttttgtgtatatttattttttttgtttttattagtaattttaggttttttttaattttatagtattatgggtttagggttatttttttattgttgttataagataggagattaaatttttttgtaggttatattatagaataatgtttttttttttttttagttttttatttttttttatatatagtttggtggttgttggaggttagttggatggtgaagtcgaatttttagtttcgttttttttgttaaggttgtcgaggaattttttaggtgttagatggttagcgagatagtaggttatattttttagtagatgttattaaaattatttgggtttgtgggtaggtgggttgtggggttttttagagagatagattaaggatatttttattttttatatttttaggaacgagggtttatttttaatttaattcgtgttttttttttatttttagttttttttaggatttaagtttttgttttttagttgttttttatttaagacgggttaaatggatgtttttatagatttggatttcgggtttgaattgaggaatcgaggtatttggggagaaggag

SEQ ID NO: 110 - DNA, 5477 bp, Artificial Sequence
  chemically treated genomic DNA (Homo sapiens)
ttttttttttttagatgtttcgattttttagtttaaattcgaaatttaggtttatgagaatatttatttggttcgttttgggtgaggaatagttagggaatagaggtttaaattttggaggggattggggatggagaggaaatacgggttgggttggggatgggttttcgtttttgaggatgtgaaaagtagaggtatttttaatttgtttttttggaaaattttatagtttatttgtttataagtttaggtgattttggtgatatttgttgggaagtgtgatttgttgtttcgttggttatttggtatttggaagatttttcgataattttagtaaggggggcgggattgagagttcgattttattatttagttggtttttagtagttattaagttgtgtatggggaggggtgggggattgaaggaaaggaggagtattattttgtgatgtaatttataaaaaggtttggttttttgttttgtagtagtagtggagggatggttttgagtttatagtattgtggggttgaggggagtttgaggttgttggtgggggtaaggaggatgggtgtgtatagggaggagataggaatttggagatttgagtaatggtggggaatttattgtagtggagttgaaggataaatggggaaaacgggggaagagagagaagggaagagatttaagttagagaaagtggaaagagatggatagagggagaaaaatagaagtataaagtgggaggatggagggatagagaaaatggaaagttttaatttatttttaaattaagttagatttttattattttatgttttatttttataaagaagagagggaataggtatatttaattaattttagatttttttatatgtaaggggagggaattgagttaggatagagatgtttgtgtttagtttttattcggggttttttttttatttttttttattttaggtatatatttttttttgtggcgttttatcggggtatttagagtatgtgagtagttatcgttattttggtattttttttttgttgttttgaggttatattttatttttcgggggtagagggagtgtttatttaggttggtaggtttagtgggggtatgttatttattgggtcggggttatgttgggatgtttgtgaattatgggcgagtttgggttggtgaagcgagggagggtattgatgtttttaatttggttattttttagttttaggtagaaatgagttgagttttagttatatttttataagtagttttattgggtgtttttttgtgtttttgtttaagtttgggttttattggaaaaaagtttttttagaagttttatttaaagtttttaggttgtaggggtttaaattaagttattggtaagaaaaaggacgaaaatgatatagatggagaatgaggggagtgtcgtggtttaggttttagttttagtttaatttattaagtagttatagtttgtttttagagtatatatatatagatatatatatatatatatatatatatatatatatatatattgtagtatttgtagtattattggatttttagatagattttttattaaaggtattttttatagttttttaagttttttattttgagttttcgatttattatattagttttttttagtaagatttttttttttattatatttgatgtttttttgatttttttgtttgagatttatagtgttattaaaatgtttgttttgttagtgatttgggttgatacggggtattagtaatgggtatttagaaaagataaaagacgtagaataggtgttttttatgaggttggattttgggtaggtgtttttttaggttttgtgaggggtttgtgaggggtttgttgagagatttggggtttttgtataaaattaggttttcgggtatgttttaaagtgtttgtgtaggtgtttttagggtcgtagtgatggcggggggtattttgggttgggggttgtagatttacggaagttagtggaggaggtgtttttttttagcgaagttggttataaagaggggtagggaggcgaggaggttggtgagttgttgtggggaagcggttatgttgtataggttttgttcgtagtagtggtgttatagagtgtaggagtgtagttagtaggtggtatagtttggtagagggtattgggtttttgagaggtagtttttttatttagtgattttattttggtttgtgggatgaaagaggtatgttgaggcgggggttataggaaaggtcggatggatggaggtagggagttttttggagaagggttattggattagagttttatttgaagtgttaatattgatgttataagttttatcgtttcgatattcggtgggaatagggtggtagggtttggtgaagttatagatgtagtagcggagtttttttcgggtaggggatatggtgagatttgttgaggtagtagagattaggagagtaggagaggtaaattttttttgtggggtaggtagaggttagattcggagagggattatagagagaggtgatatatgaagtagagagaggaaagttgtggaataagggaggaaagttgatagaagtagaaaaaatagttgggcgtagtggtttacgtttgtaattttagtacgttgggaggtcgaggcgggttgattatgaggttagaagattgagattattttggttaatatagtgaaatttcgtttttattaaaaatataaaaaattagtcgggtatggtggtatatgtttttagttttagttatttgggaggttgaggtaggagaattttttgaatttgggtggttgaggttgtagtgagtcgagattatgttattgtattttagtttgggtgatagaacgagattttgttttaaaaaaaaagagggagacgatgtaggaaaagaaatagagatggaggtaagaggggtatagggattgagagatgcgtagatatgaatagaagttataagaattagagattaatataaaaagagtgagataaaaagttagatttagtagtaggaaagttgagggggttagtgaaaaagttaagtaaatggtattagagatagataggaaaatagaaattgatattgattaaagggtttagtatagaagtaatacgtgaaataagggataggggagataggggcggattaaagatgtagtaagggggagatagttatttttaaatgttttgaaaggaaatttttttttttttattttattaggttggtttttttagtggttggtttttttgaagttttttatttttttagttttttttttggttttttttagtatttatattttttttttttttagtttttaggtttttttatatgtttttgtttttatttttagttttttgattattgaaggttttttagtttatttttatttagtgttttatagaggaatagtacgtagaggaagatgttggaggtgtttatggttagatataggtttaggaatttgggagaggtgatttgtatttcgagatttcgggatttgtagagttggagtatttgagtaagatagtgaggaattagtaaataaatatatttagggagtgaatttggggggcggaattatgattagatttattagtttgatttagtaggtagcgggggtttttagtttgtttttgtaaggagtttgtttttgtttggagggttttttttgtttttttagtatgttgtttttgtaatttagtttttttttttgtttttgagttgtgtttgtcgtttttttttttatttttttttttttttttttatgttttaagttgttttttggtttttttagtttttttttgtttttgttttttttgttttttttttttagtgtttttatgttttttaaagttatttttttaaatagtttcggcgtggatttgtttgagtgtagaattaataatatttttatttatatatttatatgtatatataaagtttagttgtgtaagggcggattttatttagttttagatttttttgatttttttaagttttaatatttttattttgtaattatttttgttagttttattattttggaggaaagaaataattacgggtggggttggagggtttgttgatgtgtttgtattggggagaaattattagaaaggaaggtatggatgggatttggggtaggggggtggtgatatagtttggaaggttggggttgaagagattgggaaggaggaaggtttatttggggaattagagttagtatgtattaggaggagtaagattaggaatagggagtgaagataggggagatataggtgtttaggagagtagttttttttaaaaatattgattttaggatttttttatattttttaaagttatttaagattttgaagagtttttttttatgaggttatattaatatttattatattaaaaattaaaatagaaaatttaaagtaggtatttattgatttatttaaataataaaaataataaagtattatatgttaataaaatatagttttgtgaaaaataattattatttttttatagtatagtgagaagttgagtattgttttatatttttgtgaatttagtgttaggtttcgtgggagatgtttgggtttttttatttgtttttgtatttagtttgttgggatatgttgttttcgttgaagtttagtatatgaagaaaatttgattttatatagatagttgtaaaaggaggatttttaaggattttgtgaaagggtattagggatttttaggggtttttgttggtttatagattgttgttgaggataaaggagtttgaggattttagaggatgttgagagtatgttgtggggtttttttttgtttttattggggtttttggtgtttgttgggggagatttttttttttttttttatagttttataaagtttaaggtacgggggatataaggtaggtagagtcgggttggggaggggggtgggtaggaggtagaggcggttttgatacgggtagattgcgatgaaattttagtttgttgggattttgtttagttttttgttaggggttgttttgggtaaggaggcggttagttagttttttatataggttttttgttagtcggttttatcgagggtttaggtttagcgtttttttttttttgttaggaaatcgaatgcggtgttataattgtggtggaagttttagtagtttttgtaaagaggtcgtgattatttgtggcgagggtagattttagttaggtttggaatagattaagttatttggaaatcgtgagtttttagttttttttttttttagtagtttttttttgtttttagttttatgttaatttttttggtttttagaattttttaggtttagtttggttttgggtagatggtgtagttgttagaggagagtagtttgtattttttttggtttttggtacggagtttttgagaggtttatagtttttgtg

SEQ ID NO: 111 - DNA, 6944 bp, Artificial Sequence
  chemically treated genomic DNA (Homo sapiens)
gaagttttataagatcgaagtggagttattggagtgttttaggtgaagaaacgatatattttgatttatagtagtaggattattgtggagagaatatttaggtggtaggtaatggaatagtgttagagttattatttaggagtgatagagtggtggggattaagggaagaggagggtttgagggatgagagggacggagggaagggttggagaagtaggaggtgaggagaaggagtagagggatagaatttgaaagtagtagaatttttagttttaaatatattgttttataaatttttaatatatttatttatagagtttagtagggtgttttttgtatttggtttttaatattttatgtgggattgtttaaaaattaattgttttttttgtttttttttaggtttaaaaaaatattaagtgttttaataaaatatgtatattatttagatgcggatattttttaaaaataggaagtgtatgagtattggtgaggggtattgtgattgcgttgaatatttgtaattttgaggtgaatgaatgtattggtttttggttgtaatatataattatacgttgtgttattttgtattgttaggagatgttttggatttttatagaaatttagggttatggaatgaaggtaattttagaatataataagagttatagatatatagtttgggaaagtaaaatttaggagttttgagagttgtataattgtaatgtatttagatatatttatatattaaggggttaaagtaatagtttttatatataagatttttgattggtcgggcgcggtggtttatgtttgtaatcgtagtattttgggaggtcgaggcgggaggattacgaggttaggagatcgagattattttggttaatacggtgaaattcgtttttataaaaaaattagtcgggcgtggtggcgggtatttgtagttttagttattcgggaggttgaagtagaagaatggcgtgaattcgggacgtagagtttgtagtgagtcgagatcgcgttattgtattttagtttgggcggtagagagagatttcgttttaaaaaaaaaaaaaaaaaaaaaaaaaaaaaaaaaaaaaaaaaaaaggtttttgataatttaggggttattaagattttattatttattgtagttaataaaaaaaaaaaagaaagaaagaaattggtttttgttttattttatatgtttaggtataatttttttagagaagaagaggaggggggcggggaggagtaggaggaggaggaaagaaggaggagaaggagaaggagaaggagaaggagaggaagaggaagaggaagaggaagaggaagaagaagaagaagaagaagaagaagaagaagaagaagaagaagaagaagaagaagaagaagaagaagaagaagaagaagaagaagaagaagaaaaggaagaagaagaaattgtttttatatttttatttttaggataagtttattgtttggtattaagttttttggggtgaatttttttttaaaagagttcggggagtttaggtatggaatgggaggtagaaagtttaattaagggattgggatttcggaatgaataatgaagggagatggattgggtttatgtcgaaggtttttttttggttttttagttttcgggcgaagatttagggagatattgagatatattttgtataggagggggagggggagggggagggtaaagttttagggttttaggagtggtttttaagggtttaggtttcgaggcggtgtttggggttgggaggtttagtattgagaattttttatttttttagagttttttttttttttttaattcgtgttaggtttttttttttggatatttataacgcggttttattttttatttttattgggcgtcgcgtttttagagaagttaattagtgtcgtcgtagtttttaggttttaaagttttacgtatttcgcgggatttatattttttttagacgcggaggttggggttatggcgtttcgaagtttttttttgttgtttttaggggttttggttttgatcgatatttgggcgggtgagtgcggggtttagagagaaacggtttttgtggggaggagtgaggggttcgttcggtgggggcgtaggatttagggagtcgttttcggaggagggtttggcgggttttagttttttttcgtttttaggtttttattttttgaggtattttagtatcgttgtgtcgcggttcggtcgcggggagtttcgttatatcgtcgtggagtacgtagacgatacgtaatttttgcggttcgatagcgacgtcgcgatttcgaggatggagtcgcgggagtcgtgggtggagtaagaggggtcgtagtattgggagtggattatagggtacgttaaggttaacgtatagattgatcgagtggttttgaggaatttgtttcgtcgttataattagagcgaggttggtgagtgaattcggtcgggggcgtaggttacgattattttttattcgttacggatcgttcgggttttttagagttttcggattcgaaatttatttcgaggtagcgggattcgtttagattttttattcgggagagttttaggcgtttttatttaggtttatttttagtttaggttaaaattttcgcgggttgggcggggagggggcggggttagttgggcggggttgattgcggggatcggttagggttttatattttttagggaatgaatggttgcgatatggggttcgacggacgtttttttcgcgggtattattagtacgcgtacgacggtaaggattatatttttttgaacgaggatttgcgtttttggatcgcggcggatatcgtggtttagattatttagcgtttttatgaggtagaggaatatgtagaggagtttaggatttatttggagggcgagtgtttggagttgtttcgtagatatttggagaatgggaaggagacgttatagcgcgtaggtattaggggttatgggcgttttttttattttttgtagattttttgggatggtttcgtataaggttgggaggaaagtggatttaatgttaggatatcgttttttttttagttttgagtaggaagaatttttttggttttcgagattcggtattagagagtgattgtgagagttcgttttgttttttgggataattaagggatgaaatttttgagggaatggagggaagatagtttttggaatatcgattcgcggttttttttgagttttttaatagttttgggtttcgtgattttttttttaagttttgttttttgttttatatttaatgtgtttgaggttttgattttagtttttcggtttttatttaggttagggttagaagtttttgttttttttttagagattttaattttttaaggaataggagatttttttaggtgtttgtgtttaggttggtgtttgggttttgtgtttttttttttattttaggtgttttgtttatttttaggttggttatatgggtgttgttggggttttttatgaggagtgtaaagtgtttgaattttttgattttttttagattttttaaaggtatacgttgtttattattttatttttgattatgaggttattttgaggtgttgggttttgggtttttattttgcggagattacgttgatttggtagcgggatggggaggaatagatttaggatatagagtttgtggagattaggtttgtaggggatggaattttttagaagtgggtcgttgtggtggtgttttttggagaggaatagagatatatatgttatgtgtagtacgaggggttgttttagttttttattttgagatggggtaaggagggagatgggtaaagaggggaacgaggggttatgtttttttttagggaaagtaggagtttttttggagttttttagtagggttagggttgaggtttggagattagggttttttatttttttttttttttttagagtagtttttttagtttattatttttatcgtgggtatcgttgttggttttgttgtttttggagttgtggttattggagttgtggtcgttgttgtgatgtggaggaagaagagtttaggtaggaaggggtgaggagtggagtttgagtttttttgttttattgggggttgtaagttttaagtagaagtgtgttttgttttattattgggaagtattatttatatttatgggtttatttagtttgggttttgtgtgttagtatttatttatttgtaaagtttttgtgaaaatgaaggatagattttttatttcgatgattatggtggtgatgggatttgattttagtagttataaattataggggaaggtttttgttgatgatagattttaggagggtagttggtttaggatttatatttgttttttttatattttttgattttgttttggatttatagttatatttttttggaaatttttttgggattaaagattaggggtttgttttaggattttatggttttgttttttttttggttttttataggatattttttttttatagatagaaatagagggagttatttttaggttgtaggtaagatgaaggaggttgatttttgagattgttgggatattgtggttaggagtttatgagggagtttatttattttatagtttttttagttatatttgtgggttttgattaggttttgtttttgttttattttaattattgatagtgtttagggttttggggtgttttttatagttaataaaggtgatattttagggtaggggttttgatgtgagtggggtgttgggggggaatagaggggatttagttgtgttattgggtttttttgatttggatgttttgagtatgaaatgggttatttagagtgttattttttattgtgattgatacgaatttgtttatgaatattttttttatagtgtgagatagtttttttgtgtgggattgagaagtaagatattaatgtagtagaattgtatttgtgttttacgaatatatataaattttaaaaataaagaataaaaatatatttttttatagatataggtagatatgtttttatagtatgtacgtaaatgtgtgtgtgtgtgtgtgtgtgtgaagagaaagagtgaatagagagattaagatttttttaatggtgaaaagatatatatatatttggaattagttagtttgatttagtttaggtgattttaattttggtggtaataattaaagtatcgtagttaggagttagtcgaatatatgtttttttttttttattagattgaattagagtgttgattttggttatattaatgttataaatttttttatagtttgtttgatttggtgtttgttggttttaatatttatagtgaatataagtaggttgttgttttttattttttttatagtttatttagtggttagcggaaatttgatgataatatggtggttaagtttattttttttgggggtgtttttttaaggatatttgggttgttttcggagttatagtgttttgggtcgtcggaaggtgggtgatatgtggattttgttttttttgtggttgtggatattttttaatattgtttttttggttttgtaaagttttcgttttggtttcggttttaggaggggtaggagttttttttttcgtttttggtattattttatgaaaagggtttagattaagatttttgattgagttattttaaagtaagttgtaagatttatgatattagattattaaatattttattatatattttttaagaataagaattaatattattatattaaagaaaataaataattttataatattatttaaagtttttttatgtttaaatatttttattttttttagtatatttttgtatttattttttatagtttgtttttttaaaatgtttattcgttgtttttggttatgtttttttaattatttataatttataataattaatttatttttttttttttagaatggtattatttgttttagagatgaggttaaatatttgtggaattttttttatattgaatttattatattattttttttgatgtttttaattttttttttttaattgttatgttttttaaggatttatgtagttttgggttaaatatttggtagtaatgtttataggaggagttgtgatcgtatatttattatattaggaggtatataaagtttagggttattaggattttttttgattttatatagttaaatttattttgattttttagagatgtagaattatgggttgggtgtttagtgggtatgagtgtgatattttggtaataggaggttttgttattttttttattttttacgagttttagttttttatattttgaggttttgagttttagatttttaattattaggttaggtttttttagatttagattttttttttgttttttttagttttattttgttttgtatttattttcggattattttttttttataggtttagtttttgagtgtttttattttttaaataagtatttttatttaggagtaatttttttattagaggatattagttatgtttggaaaaatgttttgttgttatgattggagtgaggaggaggtgttattagtattttgtggggaatgattagggatgttgaatattttgtagtgtataagttagtttaattatttatataatagataattatttagttttaatattaagattgttaagggtaaggaggtttgttaggatttttttttttttgagtataagtttttttgaattgagggatattttgaaggaaaagtgtggttttattttagttattttttttttttttggagttttatttgtatgtttgtagtgtttaggtttgtaatttggggtttaggaatttatttttttatgagattgtatgtagaagtgatgatatgtgtatata

SEQ ID NO: 112 - DNA, 6944 bp, Artificial Sequence
  chemically treated genomic DNA (Homo sapiens)
tgtgtgtatatattattatttttgtatgtagttttatgggaaggtgggtttttggattttaggttataggtttaagtattataggtatatagatggagttttagggaagggagagatgattggggtgggattatattttttttttagggtgttttttagtttaaggaagtttgtatttaagggagagaaagttttggtaggtttttttatttttggtaattttggtattggggttggataattatttgttatgtgggtgattgggttgatttgtgtattgtaggatgtttagtatttttggttattttttataagatgttggtagtattttttttttattttagttatggtaataaaatatttttttagatatagttaatgttttttggtgggaaaattgtttttggatgagaatatttgtttgagaggtagagatatttaggagttgggtttgtagagggaaagtgattcggaagtagatataaagtagagtggggttggagaagataggaagggagtttaggtttggaggggtttggtttgatggttgaaggtttggagtttagaattttagggtatggggaattaaagttcgtgaggaatggggagagtggtagaattttttattgttagaatattatatttatatttattaaatatttagtttatggttttgtatttttgggaagttaggataaatttggttgtatggggttagaaagagttttggtaattttaggttttgtgtgttttttgatgtgatgaatgtgcggttatagttttttttgtaaatattgttgttaaatgtttaatttagagttatataggtttttaggaggtatagtagttagaggaaaaaagttaaaggtattaggggaaataatatgataaatttagtgtggagaagattttataggtatttggttttatttttgaaataggtaatgttattttaaaagaaaaaagatgggttgattgttatagattgtaggtaattaaagaaatataattaaaggtaacgagtggatattttaagaaaataagttataaaaaataggtataaaaatgtattgaaagaagtggagatatttgaatataaaaggattttaaataatattatggaattatttattttttttggtgtgataatgttggtttttatttttaggaggtgtgtgatgaagtatttagtggtttagtattatgggttttgtaatttattttagaatgatttagttaaaaattttaatttggattttttttataagatggtgttaagaacgaagaaggaagtttttgttttttttaaagtcgaagttaaagcgaaggttttgtaaggttaagaaggtagtgttgaaagatgtttatagttataaaaaaaataagatttatatgttatttatttttcggcggtttaagatattgtgatttcggaggtagtttaaatatttttggaagagtatttttaggagaaataagtttgattattatgttattattaagttttcgttgattattgagtaggttgtgaagaagatagaaaataatagtttatttgtgtttattgtggatgttaaagttaataagtattagattaaataggttgtgaagaagtttgtgatattgatgtggttaaagttaatattttgatttagtttgatggagagaggaaggtatatgttcgattggtttttgattacgatgttttggttgttgttattaaaattgggattatttaaattgagttaagttggttagttttaaatatatgtatatttttttattattaaaagaattttaatttttttatttattttttttttttatatatatatatatatatatatatttacgtgtatgttataaaaatatatttatttgtatttataaaaagatatatttttattttttatttttaaaatttatgtatgttcgtgaggtataagtgtaattttgttatattgatattttgttttttagttttatataaggaagttgttttatattatagagaaaatatttatgaataaattcgtattagttatagtgagaggtaatattttaaatagtttattttatgtttaagatatttaagttaaagaaatttaatagtatagttgagttttttttgtttttttttaatattttatttatattagggtttttgttttggagtgttatttttattagttgtgagagatattttagagttttgggtattgttagtgattggggtagaataaaaataggatttggttagagtttatagatgtggttagaggaattgtggggtgggtgagtttttttataggtttttgattataatattttaataattttagggattagttttttttattttatttgtagtttgagagtagttttttttgtttttatttatgggaagaaaatgttttgtgagaggttagaaaggaggtagggttataaggttttagagtaaatttttagtttttgattttagagaagtttttagaaaagtgtaattgtagatttagggtaggattaagaaatatgaagaaagtagatgtgggttttggattaattgtttttttgaggtttgttattagtagggatttttttttgtgatttgtgattgttgggattaggttttattattattataattatcgaagtgaagaatttgttttttatttttataggagttttataaatgagtaggtgttggtatatagggtttaggttgggtagatttatgagtgtggatggtgttttttagtaatgaggtagggtatatttttatttggggtttgtaatttttagtgggataagaaaatttagattttattttttatttttttttatttgagtttttttttttttatattatagtagcgattatagttttagtgattatagttttaaggataataaggttagtaacgatgtttacgatggggatggtgggttggggagattgttttgggaaaggaagggaaggtgaggggttttgatttttaggttttagttttgattttgttgaagagttttagaagggtttttgttttttttgagaaaagatatgatttttcgtttttttttttatttatttttttttttattttattttaggatgaggggttggggtagtttttcgtgttgtatatggtatgtgtatttttgtttttttttaggaggtattattatagcggtttatttttggaaggttttattttttgtaggtttggtttttataagttttgtgttttgggtttgtttttttttatttcgttgttaggttagcgtgattttcgtagggtagaagtttagggtttagtattttagggtggttttatggttagagatggggtggtgggtaacgtgtgtttttggaggatttgagaagagttagaaaatttaggtattttgtattttttatgggaaattttagtagtatttatgtgattaatttgagaatggataggatatttggggtggggaagggagtatagaatttagatattagtttggatatagatatttgggaaaattttttattttttggaaagttagagtttttgaggggggagtagggatttttggttttgatttaagtggaggtcgagggattggaattagagttttaaatatattgagtgtgaggtagagaataaaatttgagagaaaagttacggggtttaaggttgttggagggtttaaaggggatcgcggatcggtattttagggattgttttttttttatttttttagaaattttattttttaattgttttagagagtagggcggatttttatagttattttttggtatcggatttcgaaagttaggaagattttttttatttaggattagagggagggcgatattttagtattgggtttattttttttttaattttgtgcgaggttattttaagagatttataggagatagggaaggcgtttatggtttttggtatttgcgcgttgtagcgttttttttttattttttaagtatttgcggagtaattttaggtattcgttttttaggtaggttttgaatttttttgtatatttttttgttttatagaagcgttgggtgatttgagttacggtgttcgtcgcggtttaggagcgtaggttttcgtttagggagatgtaatttttgtcgtcgtacgcgtgttggtgatattcgcggaggaggcgttcgtcgggttttatgtcgtagttatttattttttggagggtgtgagattttagtcggttttcgtagttagtttcgtttagttagtttcgtttttttttcgtttaattcgcggggattttggtttaaattgaaaatgaatttgggtaaaggcgtttgggattttttcgggtggagggtttgggcgggtttcgttgtttcggggtagatttcggattcggagattttgagggattcgggcggttcgtggcggatggggggtggtcgtgatttgcgttttcggtcgggtttatttattagtttcgttttggttgtagcggcggagtaggttttttagggttattcggttagtttgtgcgttggttttggcgtattttgtggtttatttttaatattgcggttttttttgttttatttacggttttcgcggttttattttcggaatcgcggcgtcgttgtcgaatcgtaggaattgcgtgtcgtttacgtattttacggcgatgtagcggggtttttcgcggtcgggtcgcgatatagcggtgttgaaatattttaaggagtgggagtttgggggcgaggaggggttgagattcgttagattttttttcggaggcggttttttgagttttgcgtttttatcgggcgggttttttatttttttttatagaggtcgtttttttttggatttcgtatttattcgtttaagtatcggttagggttagggtttttgagagtagtaggaggaggtttcggggcgttatgattttaattttcgcgtttgggaaaaatatgagtttcgcggggtgcgtgggattttagaatttgggaattgcggcgatattgattggtttttttagaaacgcgacgtttaatgggagtgagaaatggggtcgcgttatgagtatttaggaagaaggatttgatacgggttgggagagaaagagaaattttggggagatggggaatttttaatattgagttttttaattttagatatcgtttcggggtttgagtttttgagagttatttttggggttttgggattttgtttttttttttttttttttttttttgtgtagggtgtgttttaatgtttttttgagttttcgttcgggggttgagaaattagggagaaattttcggtatggatttagtttatttttttttattatttatttcgaaattttagttttttgattgaattttttgttttttattttatatttggatttttcggatttttttggaagaaaatttattttaaggagtttggtgttagataatgaatttgttttgagaatgaaggtgtagagatagtttttttttttttttttttttttttttttttttttttttttttttttttttttttttttttttttttttttttttttttttttttttttttttttttttttttttttttttttttttttttttttttttttttttttttttttttttttttttttttttttttttttttttttttttttttttttttgttttttttcgttttttttttttttttttttggaaaagttgtatttgagtatatgaaataggatagagattagttttttttttttttttttttttttattagttgtagtgagtagtagaattttggtaatttttgaattattaggaattttttttttttttttttttttttttttttttttttttttttttttgagacggagtttttttttgtcgtttaggttggagtgtagtggcgcgatttcggtttattgtaagttttgcgtttcgggtttacgttatttttttgttttagtttttcgagtagttgagattatagatgttcgttattacgttcggttaatttttttgtagagacgggttttatcgtgttagttaggatggtttcgattttttgatttcgtgattttttcgtttcggttttttaaagtgttgcgattataggtatgagttatcgcgttcgattaattaggaattttatgtgtaaaaattgttattttggttttttgatatataaatgtgtttaaatgtattatagttgtataatttttagagtttttaagttttgtttttttagattatgtatttgtgatttttgttgtattttaaaattatttttattttatagttttgagtttttgtgggagtttaggatattttttgataatataaagtagtataacgtgtgattgtatattgtaattaggagttaatatatttatttattttaaagttgtaagtgtttaacgtagttataatgttttttattagtgtttatgtattttttgtttttaggaagtattcgtatttaagtggtgtgtatgttttattggaatatttagtatttttttaaatttgaaaaaaagtagaaaaagtaattaatttttaggtagttttatataaggtgttaaaggttaaatgtaaggaatattttgttaggttttgtagatggatgtattaaaaatttataaaataatgtgtttaaagttaagaattttgttgtttttaaattttgtttttttgttttttttttttattttttgtttttttagttttttttttcgttttttttattttttaggtttttttttttttttagtttttattattttgttatttttgaatagtggttttagtattgttttattatttgttatttgagtgttttttttatagtggttttgttattgtgagttaaagtgtgtcgtttttttatttaaaatattttagtggttttatttcggttttgtgaagtttt

SEQ ID NO: 113 - DNA, 22 bp, Artificial Sequence
  GP1BB primer
ggtgataggagaataatgttgg

SEQ ID NO: 114 - DNA, 20 bp, Artificial Sequence
  GP1BB primer
tctcccaactacaaccaaac

SEQ ID NO: 115 - DNA, 18 bp, Artificial Sequence
  GP1BB detection oligomer
ggttaggtcgtagtattg

SEQ ID NO: 116 - DNA, 18 bp, Artificial Sequence
  GP1BB detection oligomer
ggttaggttgtagtattg

1. A method for characterising, classifying and/or differentiating renal and prostate cancer, characterised in that the following steps are carried out:
a) obtaining a biological sample containing genomic DNA
b) extracting the genomic DNA
c) in the genomic DNA sample, cytosine bases which are unmethylated at the 5-position are converted, by chemical treatment, to uracil or another base which is dissimilar to cytosine in terms of hybridisation behaviour; and
d) amplifying at least one fragment of the chemically pretreated genomic DNA using sets of primer oligonucleotides and a polymerase,
wherein the genomic CpG sequences are located within at least one of the chemically pretreated genomic sequences according to Seq. ID No.1 to Seq. ID No.112, and sequences complementary thereto.

2. Method according to claim 1, further comprising the following steps:
e) Identification of the methylation status of one or more cytosine positions; and
f) Analysis of the methylation status of the cytosine positions by reference to one or more data sets.

3. Method according to claim 1 or 2, wherein the amplification of the fragments of the chemically pretreated genomic DNA using sets of primer oligonucleotides and a polymerase is performed in a way that the amplificates carry a detectable label.

4. Method according to any of claims 1 to 3, further comprising the steps of hybridising the amplificates to a least one or more oligonucleotide and/or PNA probe or to an array, wherein the base sequence of the oligomers includes at least one CpG dinucleotide.

5. Method according to any of claims 1 to 4, characterised in that the amplification step preferentially amplifies DNA which is of particularly interest in prostate and/or renal cells, based on the specific genomic methylation status of prostate cells, as opposed to background DNA.

6. Method according to any of claims 1 to 5, characterised in that the chemical treatment is carried out by means of a solution of a bisulfite, hydrogen sulfite or disulfite.

7. Method according to any of claims 1 to 6, characterised in that more than ten different fragments having a length of 100-2000 base pairs are amplified.

8. Method according to any of claims 1 to 7, characterised in that the amplification of several DNA segments is carried out in one reaction vessel.

9. Method according to any of claims 1 to 8, characterised in that the polymerase is a heat-resistant DNA polymerase.

10. Method according to claim 9, characterised in that the amplification is carried out by means of the polymerase chain reaction (PCR).

11. Method according to any of claims 3 to 10, characterised in that the labels of the amplificates are fluorescence labels, radionuclides, and/or are detachable molecule fragments having a typical mass which are detected in a mass spectrometer.

12. Method according to any of claims 1 to 11, characterised in that the amplificates or fragments of the amplificates are detected in the mass spectrometer.

13. Method according to any of claims 3 to 12, characterised in that the produced fragments have a single positive or negative net charge for better detectability in the mass spectrometer.

14. Method according to any of claims 2 to 13, characterised in that detection is carried out and visualised by means of matrix assisted laser desorption/ionization mass spectrometry (MALDI) or using electron spray mass spectrometry (ESI).

15. Method according to any of claims 1 to 14, characterised in that the genomic DNA is obtained from cells or cellular components which contain DNA, sources of DNA comprising, for example, cell lines, histological slides, biopsies, blood, urine, lymphatic fluid, tissue embedded in paraffinm; for example, prostate, renal or lymphatic tissue and all possible combinations thereof.

16. An oligomer, in particular an oligonucleotide or peptide nucleic acid (PNA)-oligomer, said oligomer comprising in each case at least one base sequence having a length of at least 9 nucleotides which hybridizes to or is identical to a chemically pretreated genomic DNA according to one of the Seq ID Nos 1 to 112, and sequences complementary thereto.

17. The oligomer as recited in claim 16; wherein the base sequence includes at least one CpG dinucleotide.

18. The oligomer as recited in claim 17; characterised in that the cytosine of the CpG dinucleotide is located approximately in the middle third of the oligomer.

19. A set of oligomers, comprising at least two oligomers according to any of claims 16 to 18.

20. A set of oligomers as recited in claim 19, comprising oligomers for detecting the methylation state of all CpG dinucleotides within one of the sequences according to Seq. ID Nos. 1 through 112, and sequences complementary thereto.

21. A set of at least two oligonucleotides as recited in claim 19, which can be used as primer oligonucleotides for the amplification of DNA sequences of one of Seq. ID 1 through Seq. ID 112 and sequences complementary thereto and segments thereof.

22. A set of oligonucleotides as recited in claim 21, characterised in that at least one oligonucleotide is bound to a solid phase.

23. Use of a set of oligomer probes comprising at least ten of the oligomers according to any of claims 19 through 22 for detecting the cytosine methylation state and/or single nucleotide polymorphisms (SNPs) in a chemically pretreated genomic DNA according to Seq. ID No.1 to Seq. ID No.112 and sequences complementary thereto.

24. A method for manufacturing an arrangement of different oligomers (array) fixed to a carrier material for analysing diseases associated with the methylation state of the CpG dinucleotides of one of the Seq. ID 1 through Seq. ID 112 and sequences complementary thereto, wherein at least one oligomer according to any of the claims 16 through 18 is coupled to a solid phase.

25. An arrangement of different oligomers (array) obtainable according to claim 24.

26. An array of different oligonucleotide- and/or PNA-oligomer sequences as recited in claim 25, characterised in that these are arranged on a plane solid phase in the form of a rectangular or hexagonal lattice.

27. The array as recited in any of the claims 25 or 26, characterised in that the solid phase surface is composed of silicon, glass, polystyrene, aluminium, steel, iron, copper, nickel, silver, or gold.

28. A nucleic acid comprising a sequence at least 16 bases in length of a segment of chemically pretreated genomic DNA according to one of the sequences taken from the group comprising Seq. ID No.1 to Seq. ID No.112 and sequences complementary thereto.

29. A kit comprising a bisulfite (=disulfite, hydrogen sulfite) reagent as well as oligonucleotides and/or PNA-oligomers according to one of the claims 16 through 22.

30. The kit of claim 29, wherein the additional standard methylation assay reagents are standard reagents for performing a methylation assay from the group consisting of MS-SNuPE, COBRA, and combinations thereof.

31. A DNA- and/or PNA-array for analysing diseases associated with the methylation state of genes, comprising at least one nucleic acid according to one of the preceding claims.

32. The use of a nucleic acid according to claim 28, of an oligonucleotide or PNA-oligomer according to one of the claims 16 through 18, of a kit according to claims 29 to 30, of an array according to one of the claims 25 through 27, of a set of oligonucleotides according to one of claims 19 through 22 for characterising, classifying and/or differentiating renal and prostate cancers and/or for the therapy of solid tumours and cancer.
